(19) United States
(12) Patent Application Publication
(10) Pub. No.: US 2005/0221342 A1
(43) Pub. Date: Oct. 6, 2005

(54) Nucleic acids and polypeptides

(75) Inventors: Y. Tom Tang, San Jose, CA (US); Vinod Asundi, Foster City, CA (US); Ping Zhou, Cupertino, CA (US); Aidong Xue, Sunnyvale, CA (US); Feiyan Ren, Cupertino, CA (US); Jie Zhang, Campbell, CA (US); Jian-Rui Wang, San Jose, CA (US); Yonghong Yang, San Jose, CA (US); Qing A. Zhao, San Jose, CA (US); Ryle W. Goodrich, Stateline, NV (US); Chenghua Liu, San Jose, CA (US); Radoje T. Drmanac, Los Altos Hills, CA (US); Yunqing Ma, Santa Clara, CA (US); Zhiwei Wang, Athens, GA (US); Tom Wehrman, Stanford, CA (US)

Correspondence Address: NUVELO, INC, 675 ALMANOR AVE., SUNNYVALE, CA, 94085, US

(73) Assignee: NUVELO, Inc., Sunnyvale, CA (US)

(21) Appl. No.: 10/972,024

(22) Filed: Oct. 22, 2004

Related U.S. Application Data
(63) Continuation of application No. 10/273,701, filed on Oct. 18, 2002, now abandoned.
Application No. 10/273,701 is a continuation-in-part of application No. PCT/US01/08655, filed on Apr. 16, 2001.
Application No. 10/273,701 is a continuation-in-part of application No. 09/770,160, filed on Jan. 26, 2001, now abandoned.
Application No. 10/273,701 is a continuation-in-part of application No. 09/552,929, filed on Apr. 18, 2000, now abandoned.
Application No. 10/273,701 is a continuation-in-part of application No. 09/668,317, filed on Sep. 22, 2000, now abandoned.
Application No. 10/273,701 is a continuation-in-part of application No. 10/105,891, filed on Mar. 25, 2002, now abandoned.
Application No. 10/273,701 is a continuation-in-part of application No. 10/125,237, filed on Apr. 17, 2002, now abandoned.
Application No. 10/273,701 is a continuation-in-part of application No. 09/695,783, filed on Oct. 24, 2000, now abandoned.
Application No. 10/273,701 is a continuation-in-part of application No. 10/232,484, filed on Aug. 30, 2002, now abandoned.
Application No. 10/273,701 is a continuation-in-part of application No. 09/728,628, filed on Dec. 1, 2000, now abandoned.
Application No. 10/273,701 is a continuation-in-part of application No. 09/783,066, filed on Feb. 13, 2001, now abandoned.
Application No. 10/273,701 is a continuation-in-part of application No. 09/816,828, filed on Mar. 22, 2001, now abandoned.

(51) Int. Cl. C12Q 1/68; C07H 21/04; C12N 15/09; C07K 14/47

(52) U.S. Cl. 435/6; 435/320.1; 435/325; 435/69.1; 530/350; 536/23.5

(57) ABSTRACT

The present invention provides novel nucleic acids, novel polypeptide sequences encoded by these nucleic acids and uses thereof.

[0001] This application is a continuation-in-part of each of PCT/US01/08655 filed Apr. 16, 2001, Docket No. 791CIP2A-2E/PCT, U.S. application Ser. No. 09/770,160 filed Jan. 26, 2001, Docket No. 791CIP, U.S. application Ser. No. 09/552,929 filed Apr. 18, 2000, Docket No. 791, U.S. application Ser. No. 09/668,317 filed Sep. 22, 2000, Docket No. 791CIP2A, U.S. application Ser. No. 09/695,783 filed Oct. 24, 2000, Docket No. 791CIP2B, U.S. application Ser. No. 09/728,628 filed Dec. 1, 2000, Docket No. 791CIP2C, U.S. application Ser. No. 09/783,066 filed Feb. 13, 2001, Docket No. 791CIP2D, and U.S. application Ser. No. 09/816,828 filed Mar. 22, 2001, Docket No. 791CIP2E, all of which are incorporated herein by reference in their entirety, specifically including, but not limited to, incorporation by reference of the tables in each application displaying sequence information, homology information, ematrix signatures, pfam signatures, signal peptide information, transmembrane domain information, chromosomal localization and tissue distribution information, and/or 3-dimensional structural information.

### 1. TECHNICAL FIELD

[0002] The present invention provides novel polynucleotides and proteins encoded by such polynucleotides, along with uses for these polynucleotides and proteins, for example in therapeutic, diagnostic and research methods.

### 2. BACKGROUND

[0003] Technology aimed at the discovery of protein factors (including e.g., cytokines, such as lymphokines, interferons, circulating soluble factors, chemokines, and interleukins) has matured rapidly over the past decade. The now routine hybridization cloning and expression cloning techniques clone novel polynucleotides “directly” in the sense that they rely on information directly related to the discovered protein (i.e., partial DNA/amino acid sequence of the protein in the case of hybridization cloning; activity of the protein in the case of expression cloning). More recent “indirect” cloning techniques such as signal sequence cloning, which isolates DNA sequences based on the presence of a now well-recognized secretory leader sequence motif, as well as various PCR-based or low stringency hybridization-based cloning techniques, have advanced the state of the art by making available large numbers of DNA/amino acid sequences for proteins that are known to have biological activity, for example, by virtue of their secreted nature in the case of leader sequence cloning, by virtue of their cell or tissue source in the case of PCR-based techniques, or by virtue of structural similarity to other genes of known biological activity.

[0004] Identified polynucleotide and polypeptide sequences have numerous applications in, for example, diagnostics, forensics, gene mapping; identification of mutations responsible for genetic disorders or other traits, to assess biodiversity, and to produce many other types of data and products dependent on DNA and amino acid sequences.

### 3. SUMMARY OF THE INVENTION

[0005] The compositions of the present invention include novel isolated polypeptides, novel isolated polynucleotides encoding such polypeptides, including recombinant DNA molecules, cloned genes or degenerate variants thereof, especially naturally occurring variants such as allelic variants, antisense polynucleotide molecules, and antibodies that specifically recognize one or more epitopes present on such polypeptides, as well as hybridomas producing such antibodies.

[0006] The compositions of the present invention additionally include vectors, including expression vectors, containing the polynucleotides of the invention, cells genetically engineered to contain such polynucleotides and cells genetically engineered to express such polynucleotides.

[0007] The present invention relates to a collection or library of at least one novel nucleic acid sequence assembled from expressed sequence tags (ESTs) isolated mainly by sequencing by hybridization (SBH), and in some cases, sequences obtained from one or more public databases. The invention relates also to the proteins encoded by such polynucleotides, along with therapeutic, diagnostic and research utilities for these polynucleotides and proteins. These nucleic acid sequences are designated as SEQ ID NO: 1-146, or 293-438. The polypeptides sequences are designated SEQ ID NO: 147-292, or 439-584. The nucleic acids and polypeptides are provided in the Sequence Listing. In the nucleic acids provided in the Sequence Listing, A is adenosine; C is cytosine; G is guanine; T is thymine; and N is unknown or any of the four bases. In the amino acids provided in the Sequence Listing, and Table 6, * corresponds to the stop codon.

[0008] The nucleic acid sequences of the present invention also include, nucleic acid sequences that hybridize to the complement of SEQ ID NO: 1-146, or 293-438 under stringent hybridization conditions; nucleic acid sequences which are allelic variants or species homologues of any of the nucleic acid sequences recited above, or nucleic acid sequences that encode a peptide comprising a specific domain or truncation of the peptides encoded by SEQ ID NO: 1-146, or 293-438. A polynucleotide comprising a nucleotide sequence having at least 90% identity to an identifying sequence of SEQ ID NO: 1-146, or 293-438 or a degenerate variant or fragment thereof. The identifying sequence can be 100 base pairs in length.

[0009] The nucleic acid sequences of the present invention also include the sequence information from the nucleic acid sequences of SEQ ID NO: 1-146, or 293-438. The sequence information can be a segment of any one of SEQ ID NO: 1-146, or 293-438 that uniquely identifies or represents the sequence information of SEQ ID NO: 1-146, or 293-438.

[0010] A collection as used in this application can be a collection of only one polynucleotide. The collection of sequence information or identifying information of each sequence can be provided on a nucleic acid array. In one embodiment, segments of sequence information are provided on a nucleic acid array to detect the polynucleotide that contains the segment. The array can be designed to detect full-match or mismatch to the polynucleotide that contains the segment. The collection can also be provided in a computer-readable format.

[0011] This invention also includes the reverse or direct complement of any of the nucleic acid sequences recited above; cloning or expression vectors containing the nucleic acid sequences; and host cells or organisms transformed with these expression vectors. Nucleic acid sequences (or their reverse or direct complements) according to the invention have numerous applications in a variety of techniques known to those skilled in the art of molecular biology, such as use as hybridization probes, use as primers for PCR, use in an array, use in computer-readable media, use in sequencing full-length genes, use for chromosome and gene mapping, use in the recombinant production of protein, and use in the generation of anti-sense DNA or RNA, their chemical analogs and the like.

[0012] In a preferred embodiment, the nucleic acid sequences of SEQ ID NO: 1-146, or 293-438 or novel segments or parts of the nucleic acids of the invention are used as primers in expression assays that are well known in the art. In a particularly preferred embodiment, the nucleic acid sequences of SEQ ID NO: 1-146, or 293-438 or novel segments or parts of the nucleic acids provided herein are used in diagnostics for identifying expressed genes or, as well known in the art and exemplified by Vollrath et al., Science 258:52-59 (1992), as expressed sequence tags for physical mapping of the human genome.

[0013] The isolated polynucleotides of the invention include, but are not limited to, a polynucleotide comprising any one of the nucleotide sequences set forth in SEQ ID NO: 1-146, or 293-438; a polynucleotide comprising any of the full length protein coding sequences of SEQ ID NO: 1-146, or 293-438; and a polynucleotide comprising any of the nucleotide sequences of the mature protein coding sequences of SEQ ID NO: 1-146, or 293-438. The polynucleotides of the present invention also include, but are not limited to, a polynucleotide that hybridizes under stringent hybridization conditions to (a) the complement of any one of the nucleotide sequences set forth in SEQ ID NO: 1-146, or 293-438; (b) a nucleotide sequence encoding any one of the amino acid sequences set forth in the Sequence Listing; (c) a polynucleotide which is an allelic variant of any polynucleotides recited above; (d) a polynucleotide which encodes a species homolog (e.g. orthologs) of any of the proteins recited above; or (e) a polynucleotide that encodes a polypeptide comprising a specific domain or truncation of any of the polypeptides comprising an amino acid sequence set forth in the Sequence Listing.

[0014] The isolated polypeptides of the invention include, but are not limited to, a polypeptide comprising any of the amino acid sequences set forth in SEQ ID NO: 147-292, or 439-584; or the corresponding full length or mature protein. Polypeptides of the invention also include polypeptides with biological activity that are encoded by (a) any of the polynucleotides having a nucleotide sequence set forth in SEQ ID NO: 1-146, or 293-438; or (b) polynucleotides that hybridize to the complement of the polynucleotides of (a) under stringent hybridization conditions. Biologically or immunologically active variants of any of the polypeptide sequences in the Sequence Listing, and “substantial equivalents” thereof (e.g., with at least about 65%, 70%, 75%, 80%, 85%, 90%, 95%, 98% or 99% amino acid sequence identity) that preferably retain biological activity are also contemplated. The polypeptides of the invention may be wholly or partially chemically synthesized but are preferably produced by recombinant means using the genetically engineered cells (e.g. host cells) of the invention.

[0015] The invention also provides compositions comprising a polypeptide of the invention. Polypeptide compositions of the invention may further comprise an acceptable carrier, such as a hydrophilic, e.g., pharmaceutically acceptable, carrier.

[0016] The invention also provides host cells transformed or transfected with a polynucleotide of the invention.

[0017] The invention also relates to methods for producing a polypeptide of the invention comprising growing a culture of the host cells of the invention in a suitable culture medium under conditions permitting expression of the desired polypeptide, and purifying the polypeptide from the culture or from the host cells. Preferred embodiments include those in which the protein produced by such process is a mature form of the protein.

[0018] Polynucleotides according to the invention have numerous applications in a variety of techniques known to those skilled in the art of molecular biology. These techniques include use as hybridization probes, use as oligomers, or primers, for PCR, use for chromosome and gene mapping, use in the recombinant production of protein, and use in generation of anti-sense DNA or RNA, their chemical analogs and the like. For example, when the expression of an mRNA is largely restricted to a particular cell or tissue type, polynucleotides of the invention can be used as hybridization probes to detect the presence of the particular cell or tissue mRNA in a sample using, e.g., in situ hybridization.

[0019] In other exemplary embodiments, the polynucleotides are used in diagnostics as expressed sequence tags for identifying expressed genes or, as well known in the art and exemplified by Vollrath et al., Science 258:52-59 (1992), as expressed sequence tags for physical mapping of the human genome.

[0020] The polypeptides according to the invention can be used in a variety of conventional procedures and methods that are currently applied to other proteins. For example, a polypeptide of the invention can be used to generate an antibody that specifically binds the polypeptide. Such antibodies, particularly monoclonal antibodies, are useful for detecting or quantitating the polypeptide in tissue. The polypeptides of the invention can also be used as molecular weight markers, and as a food supplement.

[0021] Methods are also provided for preventing, treating, or ameliorating a medical condition which comprises the step of administering to a mammalian subject a therapeutically effective amount of a composition comprising a polypeptide of the present invention and a pharmaceutically acceptable carrier.

[0022] In particular, the polypeptides and polynucleotides of the invention can be utilized, for example, in methods for the prevention and/or treatment of disorders involving aberrant protein expression or biological activity.

[0023] The present invention further relates to methods for detecting the presence of the polynucleotides or polypeptides of the invention in a sample. Such methods can, for example, be utilized as part of prognostic and diagnostic evaluation of disorders as recited herein and for the identification of subjects exhibiting a predisposition to such conditions. The invention provides a method for detecting the polynucleotides of the invention in a sample, comprising contacting the sample with a compound that binds to and forms a complex with the polynucleotide of interest for a period sufficient to form the complex and under conditions sufficient to form a complex and detecting the complex such that if a complex is detected, the polynucleotide of interest is detected. The invention also provides a method for detecting the polypeptides of the invention in a sample comprising contacting the sample with a compound that binds to and forms a complex with the polypeptide under conditions and for a period sufficient to form the complex and detecting the formation of the complex such that if a complex is formed, the polypeptide is detected.

[0024] The invention also provides kits comprising polynucleotide probes and/or monoclonal antibodies, and optionally quantitative standards, for carrying out methods of the invention. Furthermore, the invention provides methods for evaluating the efficacy of drugs, and monitoring the progress of patients, involved in clinical trials for the treatment of disorders as recited above.

[0025] The invention also provides methods for the identification of compounds that modulate (i.e., increase or decrease) the expression or activity of the polynucleotides and/or polypeptides of the invention. Such methods can be utilized, for example, for the identification of compounds that can ameliorate symptoms of disorders as recited herein. Such methods can include, but are not limited to, assays for identifying compounds and other substances that interact with (e.g., bind to) the polypeptides of the invention. The invention provides a method for identifying a compound that binds to the polypeptides of the invention comprising contacting the compound with a polypeptide of the invention in a cell for a time sufficient to form a polypeptide/compound complex, wherein the complex drives expression of a reporter gene sequence in the cell; and detecting the complex by detecting the reporter gene sequence expression such that if expression of the reporter gene is detected the compound the binds to a polypeptide of the invention is identified.

[0026] The methods of the invention also provide methods for treatment which involve the administration of the polynucleotides or polypeptides of the invention to individuals exhibiting symptoms or tendencies. In addition, the invention encompasses methods for treating diseases or disorders as recited herein comprising administering compounds and other substances that modulate the overall activity of the target gene products. Compounds and other substances can effect such modulation either on the level of target gene/protein expression or target protein activity.

[0027] The polypeptides of the present invention and the polynucleotides encoding them are also useful for the same functions known to one of skill in the art as the polypeptides and polynucleotides to which they have homology (set forth in Table 2); for which they have a signature region (as set forth in Table 3); or for which they have homology to a gene family (as set forth in Table 4). If no homology is set forth for a sequence, then the polypeptides and polynucleotides of the present invention are useful for a variety of applications, as described herein, including use in arrays for detection.

### 4. DETAILED DESCRIPTION OF THE INVENTION

### 4.1 Definitions

[0028] It must be noted that as used herein and in the appended claims, the singular forms “a”, “an” and “the” include plural references unless the context clearly dictates otherwise.

[0029] The term “active” refers to those forms of the polypeptide which retain the biologic and/or immunologic activities of any naturally occurring polypeptide. According to the invention, the terms “biologically active” or “biological activity” refer to a protein or peptide having structural, regulatory or biochemical functions of a naturally occurring molecule. Likewise “immunologically active” or “immunological activity” refers to the capability of the natural, recombinant or synthetic polypeptide to induce a specific immune response in appropriate animals or cells and to bind with specific antibodies.

[0030] The term “activated cells” as used in this application are those cells which are engaged in extracellular or intracellular membrane trafficking, including the export of secretory or enzymatic molecules as part of a normal or disease process.

[0031] The terms “complementary” or “complementarity” refer to the natural binding of polynucleotides by base pairing. For example, the sequence 5′-AGT-3′ binds to the complementary sequence 3′-TCA-5′. Complementarity between two single-stranded molecules may be “partial” such that only some of the nucleic acids bind or it may be “complete” such that total complementarity exists between the single stranded molecules. The degree of complementarity between the nucleic acid strands has significant effects on the efficiency and strength of the hybridization between the nucleic acid strands.

[0032] The term “embryonic stem cells (ES)” refers to a cell that can give rise to many differentiated cell types in an embryo or an adult, including the germ cells. The term “germ line stem cells (GSCs)” refers to stem cells derived from primordial stem cells that provide a steady and continuous source of germ cells for the production of gametes. The term “primordial germ cells (PGCs)” refers to a small population of cells set aside from other cell lineages particularly from the yolk sac, mesenteries, or gonadal ridges during embryogenesis that have the potential to differentiate into germ cells and other cells. PGCs are the source from which GSCs and ES cells are derived. The PGCs, the GSCs and the ES cells are capable of self-renewal. Thus these cells not only populate the germ line and give rise to a plurality of terminally differentiated cells that comprise the adult specialized organs, but are able to regenerate themselves.

[0033] The term “expression modulating fragment,” EMF, means a series of nucleotides which modulates the expression of an operably linked ORF or another EMF.

[0034] As used herein, a sequence is said to “modulate the expression of an operably linked sequence” when the expression of the sequence is altered by the presence of the EMF. EMFs include, but are not limited to, promoters, and promoter modulating sequences (inducible elements). One class of EMFs are nucleic acid fragments which induce the expression of an operably linked ORF in response to a specific regulatory factor or physiological event.

[0035] The terms “nucleotide sequence” or “nucleic acid” or “polynucleotide” or “oligonculeotide” are used interchangeably and refer to a heteropolymer of nucleotides or the sequence of these nucleotides. These phrases also refer to DNA or RNA of genomic or synthetic origin which may be single-stranded or double-stranded and may represent the sense or the antisense strand, to peptide nucleic acid (PNA) or to any DNA-like or RNA-like material. In the sequences herein A is adenine, C is cytosine, T is thymine, G is guanine and N is A, C, G or T (U). It is contemplated that where the polynucleotide is RNA, the T (thymine) in the sequences provided herein is substituted with U (uracil). Generally, nucleic acid segments provided by this invention may be assembled from fragments of the genome and short oligonucleotide linkers, or from a series of oligonucleotides, or from individual nucleotides, to provide a synthetic nucleic acid which is capable of being expressed in a recombinant transcriptional unit comprising regulatory elements derived from a microbial or viral operon, or a eukaryotic gene.

[0036] The terms “oligonucleotide fragment” or a “polynucleotide fragment”, “portion,” or “segment” or “probe” or “primer” are used interchangeably and refer to a sequence of nucleotide residues which are at least about 5 nucleotides, more preferably at least about 7 nucleotides, more preferably at least about 9 nucleotides, more preferably at least about 11 nucleotides and most preferably at least about 17 nucleotides. The fragment is preferably less than about 500 nucleotides, preferably less than about 200 nucleotides, more preferably less than about 100 nucleotides, more preferably less than about 50 nucleotides and most preferably less than 30 nucleotides. Preferably the probe is from about 6 nucleotides to about 200 nucleotides, preferably from about 15 to about 50 nucleotides, more preferably from about 17 to 30 nucleotides and most preferably from about 20 to 25 nucleotides. Preferably the fragments can be used in polymerase chain reaction (PCR), various hybridization procedures or microarray procedures to identify or amplify identical or related parts of mRNA or DNA molecules. A fragment or segment may uniquely identify each polynucleotide sequence of the present invention. Preferably the fragment comprises a sequence substantially similar to any one of SEQ ID NO: 1-146, or 293-438.

[0037] Probes may, for example, be used to determine whether specific mRNA molecules are present in a cell or tissue or to isolate similar nucleic acid sequences from chromosomal DNA as described by Walsh et al. (Walsh, P. S. et al., 1992, PCR Methods Appl 1:241-250). They may be labeled by nick translation, Klenow fill-in reaction, PCR, or other methods well known in the art. Probes of the present invention, their preparation and/or labeling are elaborated in Sambrook, J. et al., 1989, Molecular Cloning: A Laboratory Manual, Cold Spring Harbor Laboratory, N.Y.; or Ausubel, F. M. et al., 1989, Current Protocols in Molecular Biology, John Wiley & Sons, New York N.Y., both of which are incorporated herein by reference in their entirety.

[0038] The nucleic acid sequences of the present invention also include the sequence information from the nucleic acid sequences of SEQ ID NO: 1-146, or 293-438. The sequence information can be a segment of any one of SEQ ID NO: 1-146, or 293-438 that uniquely identifies or represents the sequence information of that sequence of SEQ ID NO: 1-146, or 293-438. One such segment can be a twenty-mer nucleic acid sequence because the probability that a twenty-mer is fully matched in the human genome is 1 in 300. In the human genome, there are three billion base pairs in one set of chromosomes. Because 4²⁰ possible twenty-mers exist, there are 300 times more twenty-mers than there are base pairs in a set of human chromosomes. Using the same analysis, the probability for a seventeen-mer to be fully matched in the human genome is approximately 1 in 5. When these segments are used in arrays for expression studies, fifteen-mer segments can be used. The probability that the fifteen-mer is fully matched in the expressed sequences is also approximately one in five because expressed sequences comprise less than approximately 5% of the entire genome sequence.

[0039] Similarly, when using sequence information for detecting a single mismatch, a segment can be a twenty-five mer. The probability that the twenty-five mer would appear in a human genome with a single mismatch is calculated by multiplying the probability for a full match (1÷4²⁵) times the increased probability for mismatch at each nucleotide position (3×25). The probability that an eighteen mer with a single mismatch can be detected in an array for expression studies is approximately one in five. The probability that a twenty-mer with a single mismatch can be detected in a human genome is approximately one in five.

[0040] The term “open reading frame,” ORF, means a series of nucleotide triplets coding for amino acids without any termination codons and is a sequence translatable into protein.

[0041] The terms “operably linked” or “operably associated” refer to functionally related nucleic acid sequences. For example, a promoter is operably associated or operably linked with a coding sequence if the promoter controls the transcription of the coding sequence. While operably linked nucleic acid sequences can be contiguous and in the same reading frame, certain genetic elements e.g. repressor genes are not contiguously linked to the coding sequence but still control transcription/translation of the coding sequence.

[0042] The term “pluripotent” refers to the capability of a cell to differentiate into a number of differentiated cell types that are present in an adult organism. A pluripotent cell is restricted in its differentiation capability in comparison to a totipotent cell.

[0043] The terms “polypeptide” or “peptide” or “amino acid sequence” refer to an oligopeptide, peptide, polypeptide or protein sequence or fragment thereof and to naturally occurring or synthetic molecules. A polypeptide “fragment,” “portion,” or “segment” is a stretch of amino acid residues of at least about 5 amino acids, preferably at least about 7 amino acids, more preferably at least about 9 amino acids and most preferably at least about 17 or more amino acids. The peptide preferably is not greater than about 500 amino acids, more preferably less than 200 amino acids more preferably less than 150 amino acids and most preferably less than 100 amino acids. Preferably the peptide is from about 5 to about 200 amino acids. To be active, any polypeptide must have sufficient length to display biological and/or immunological activity.

[0044] The term “naturally occurring polypeptide” refers to polypeptides produced by cells that have not been genetically engineered and specifically contemplates various polypeptides arising from post-translational modifications of the polypeptide including, but not limited to, acetylation, carboxylation, glycosylation, phosphorylation, lipidation and acylation.

[0045] The term “translated protein coding portion” means a sequence which encodes for the full length protein which may include any leader sequence or any processing sequence.

[0046] The term “mature protein coding sequence” means a sequence which encodes a peptide or protein without a signal or leader sequence. The “mature protein portion” means that portion of the protein which does not include a signal or leader sequence. The peptide may have been produced by processing in the cell which removes any leader/signal sequence. The mature protein portion may or may not include an initial methionine residue. The methionine residue may be removed from the protein during processing in the cell. The peptide may be produced synthetically or the protein may have been produced using a polynucleotide only encoding for the mature protein coding sequence.

[0047] The term “derivative” refers to polypeptides chemically modified by such techniques as ubiquitination, labeling (e.g., with radionuclides or various enzymes), covalent polymer attachment such as pegylation (derivatization with polyethylene glycol) and insertion or substitution by chemical synthesis of amino acids such as ornithine, which do not normally occur in human proteins.

[0048] The term “variant” (or “analog”) refers to any polypeptide differing from naturally occurring polypeptides by amino acid insertions, deletions, and substitutions, created using, e g., recombinant DNA techniques. Guidance in determining which amino acid residues may be replaced, added or deleted without abolishing activities of interest, may be found by comparing the sequence of the particular polypeptide with that of homologous peptides and minimizing the number of amino acid sequence changes made in regions of high homology (conserved regions) or by replacing amino acids with consensus sequence.

[0049] Alternatively, recombinant variants encoding these same or similar polypeptides may be synthesized or selected by making use of the “redundancy” in the genetic code. Various codon substitutions, such as the silent changes which produce various restriction sites, may be introduced to optimize cloning into a plasmid or viral vector or expression in a particular prokaryotic or eukaryotic system. Mutations in the polynucleotide sequence may be reflected in the polypeptide or domains of other peptides added to the polypeptide to modify the properties of any part of the polypeptide, to change characteristics such as ligand-binding affinities, interchain affinities, or degradation/turnover rate.

[0050] Preferably, amino acid “substitutions” are the result of replacing one amino acid with another amino acid having similar structural and/or chemical properties, i.e., conservative amino acid replacements. “Conservative” amino acid substitutions may be made on the basis of similarity in polarity, charge, solubility, hydrophobicity, hydrophilicity, and/or the amphipathic nature of the residues involved. For example, nonpolar (hydrophobic) amino acids include alanine, leucine, isoleucine, valine, proline, phenylalanine, tryptophan, and methionine; polar neutral amino acids include glycine, serine, threonine, cysteine, tyrosine, asparagine, and glutamine; positively charged (basic) amino acids include arginine, lysine, and histidine; and negatively charged (acidic) amino acids include aspartic acid and glutamic acid. “Insertions” or “deletions” are preferably in the range of about 1 to 20 amino acids, more preferably 1 to 10 amino acids. The variation allowed may be experimentally determined by systematically making insertions, deletions, or substitutions of amino acids in a polypeptide molecule using recombinant DNA techniques and assaying the resulting recombinant variants for activity.

[0051] Alternatively, where alteration of function is desired, insertions, deletions or non-conservative alterations can be engineered to produce altered polypeptides. Such alterations can, for example, alter one or more of the biological functions or biochemical characteristics of the polypeptides of the invention. For example, such alterations may change polypeptide characteristics such as ligand-binding affinities, interchain affinities, or degradation/turnover rate. Further, such alterations can be selected so as to generate polypeptides that are better suited for expression, scale up and the like in the host cells chosen for expression. For example, cysteine residues can be deleted or substituted with another amino acid residue in order to eliminate disulfide bridges.

[0052] The terms “purified” or “substantially purified” as used herein denotes that the indicated nucleic acid or polypeptide is present in the substantial absence of other biological macromolecules, e.g., polynucleotides, proteins, and the like. In one embodiment, the polynucleotide or polypeptide is purified such that it constitutes at least 95% by weight, more preferably at least 99% by weight, of the indicated biological macromolecules present (but water, buffers, and other small molecules, especially molecules having a molecular weight of less than 1000 daltons, can be present).

[0053] The term “isolated” as used herein refers to a nucleic acid or polypeptide separated from at least one other component (e.g., nucleic acid or polypeptide) present with the nucleic acid or polypeptide in its natural source. In one embodiment, the nucleic acid or polypeptide is found in the presence of (if anything) only a solvent, buffer, ion, or other component normally present in a solution of the same. The terms “isolated” and “purified” do not encompass nucleic acids or polypeptides present in their natural source.

[0054] The term “recombinant,” when used herein to refer to a polypeptide or protein, means that a polypeptide or protein is derived from recombinant (e.g., microbial, insect, or mammalian) expression systems. “Microbial” refers to recombinant polypeptides or proteins made in bacterial or fungal (e.g., yeast) expression systems. As a product, “recombinant microbial” defines a polypeptide or protein essentially free of native endogenous substances and unaccompanied by associated native glycosylation. Polypeptides or proteins expressed in most bacterial cultures, e.g., E. coli, will be free of glycosylation modifications; polypeptides or proteins expressed in yeast will have a glycosylation pattern in general different from those expressed in mammalian cells.

[0055] The term “recombinant expression vehicle or vector” refers to a plasmid or phage or virus or vector, for expressing a polypeptide from a DNA (RNA) sequence. An expression vehicle can comprise a transcriptional unit comprising an assembly of (1) a genetic element or elements having a regulatory role in gene expression, for example, promoters or enhancers, (2) a structural or coding sequence which is transcribed into mRNA and translated into protein, and (3) appropriate transcription initiation and termination sequences. Structural units intended for use in yeast or eukaryotic expression systems preferably include a leader sequence enabling extracellular secretion of translated protein by a host cell. Alternatively, where recombinant protein is expressed without a leader or transport sequence, it may include an amino terminal methionine residue. This residue may or may not be subsequently cleaved from the expressed recombinant protein to provide a final product.

[0056] The term “recombinant expression system” means host cells which have stably integrated a recombinant transcriptional unit into chromosomal DNA or carry the recombinant transcriptional unit extrachromosomally. Recombinant expression systems as defined herein will express heterologous polypeptides or proteins upon induction of the regulatory elements linked to the DNA segment or synthetic gene to be expressed. This term also means host cells which have stably integrated a recombinant genetic element or elements having a regulatory role in gene expression, for example, promoters or enhancers. Recombinant expression systems as defined herein will express polypeptides or proteins endogenous to the cell upon induction of the regulatory elements linked to the endogenous DNA segment or gene to be expressed. The cells can be prokaryotic or eukaryotic.

[0057] The term “secreted” includes a protein that is transported across or through a membrane, including transport as a result of signal sequences in its amino acid sequence when it is expressed in a suitable host cell. “Secreted” proteins include without limitation proteins secreted wholly (e.g., soluble proteins) or partially (e.g., receptors) from the cell in which they are expressed. “Secreted” proteins also include without limitation proteins that are transported across the membrane of the endoplasmic reticulum. “Secreted” proteins are also intended to include proteins containing non-typical signal sequences (e.g. Interleukin-1 Beta, see Krasney, P. A. and Young, P. R. (1992) Cytokine 4(2): 134-143) and factors released from damaged cells (e.g. Interleukin-1 Receptor Antagonist, see Arend, W. P. et. al. (1998) Annu. Rev. Immunol. 16:27-55)

[0058] Where desired, an expression vector may be designed to contain a “signal or leader sequence” which will direct the polypeptide through the membrane of a cell. Such a sequence may be naturally present on the polypeptides of the present invention or provided from heterologous protein sources by recombinant DNA techniques.

[0059] The term “stringent” is used to refer to conditions that are commonly understood in the art as stringent. Stringent conditions can include highly stringent conditions (i.e., hybridization to filter-bound DNA in 0.5 M NaHPO₄, 7% sodium dodecyl sulfate (SDS), 1 mM EDTA at 65° C., and washing in 0.1×SSC/0.1% SDS at 68° C.), and moderately stringent conditions (i.e., washing in 0.2×SSC/0.1% SDS at 42° C.). Other exemplary hybridization conditions are described herein in the examples.

[0060] In instances of hybridization of deoxyoligonucleotides, additional exemplary stringent hybridization conditions include washing in 6×SSC/0.05% sodium pyrophosphate at 37° C. (for 14-base oligonucleotides), 48° C. (for 17-base oligos), 55° C. (for 20-base oligonucleotides), and 60° C. (for 23-base oligonucleotides).

[0061] As used herein, “substantially equivalent” can refer both to nucleotide and amino acid sequences, for example a mutant sequence, that varies from a reference sequence by one or more substitutions, deletions, or additions, the net effect of which does not result in an adverse functional dissimilarity between the reference and subject sequences. Typically, such a substantially equivalent sequence varies from one of those listed herein by no more than about 35% (i.e., the number of individual residue substitutions, additions, and/or deletions in a substantially equivalent sequence, as compared to the corresponding reference sequence, divided by the total number of residues in the substantially equivalent sequence is about 0.35 or less). Such a sequence is said to have 65% sequence identity to the listed sequence. In one embodiment, a substantially equivalent, e.g., mutant, sequence of the invention varies from a listed sequence by no more than 30% (70% sequence identity); in a variation of this embodiment, by no more than 25% (75% sequence identity); and in a further variation of this embodiment, by no more than 20% (80% sequence identity) and in a further variation of this embodiment, by no more than 10% (90% sequence identity) and in a further variation of this embodiment, by no more that 5% (95% sequence identity). Substantially equivalent, e.g., mutant, amino acid sequences according to the invention preferably have at least 80% sequence identity with a listed amino acid sequence, more preferably at least 85% sequence identity, more preferably at least 90% sequence identity, more preferably at least 95% identity, more preferably at least 98% identity, and most preferably at least 99% identity. Substantially equivalent nucleotide sequences of the invention can have lower percent sequence identities, taking into account, for example, the redundancy or degeneracy of the genetic code. Preferably, nucleotide sequence has at least about 65% identity, more preferably at least about 75% identity, more preferably at least about 80% sequence identity, more preferably at least about 85% sequence identity, more preferably at least about 90% sequence identity, and most preferably at least about 95% identity, more preferably at least about 98% sequence identity, and most preferably at least about 99% sequence identity. For the purposes of the present invention, sequences having substantially equivalent biological activity and substantially equivalent expression characteristics are considered substantially equivalent. For the purposes of determining equivalence, truncation of the mature sequence (e.g., via a mutation which creates a spurious stop codon) should be disregarded. Sequence identity may be determined, e.g., using the Jotun Hein method (Heir, J. (1990) Methods Enzymol. 183:626-645). Identity between sequences can also be determined by other methods known in the art, e.g. by varying hybridization conditions.

[0062] The term “totipotent” refers to the capability of a cell to differentiate into all of the cell types of an adult organism.

[0063] The term “transformation” means introducing DNA into a suitable host cell so that the DNA is replicable, either as an extrachromosomal element, or by chromosomal integration. The term “transfection” refers to the taking up of an expression vector by a suitable host cell, whether or not any coding sequences are in fact expressed. The term “infection” refers to the introduction of nucleic acids into a suitable host cell by use of a virus or viral vector.

[0064] As used herein, an “uptake modulating fragment,” UMF, means a series of nucleotides which mediate the uptake of a linked DNA fragment into a cell. UMFs can be readily identified using known UMFs as a target sequence or target motif with the computer-based systems described below. The presence and activity of a UMF can be confirmed by attaching the suspected UMF to a marker sequence. The resulting nucleic acid molecule is then incubated with an appropriate host under appropriate conditions and the uptake of the marker sequence is determined. As described above, a UMF will increase the frequency of uptake of a linked marker sequence.

[0065] Each of the above terms is meant to encompass all that is described for each, unless the context dictates otherwise.

### 4.2 Nucleic Acids of the Invention

[0066] Nucleotide sequences of the invention are set forth in the Sequence Listing.

[0067] The isolated polynucleotides of the invention include a polynucleotide comprising the nucleotide sequences of SEQ ID NO: 1-146, or 293-438; a polynucleotide encoding any one of the peptide sequences of SEQ ID NO: 147-292, or 439-584; and a polynucleotide comprising the nucleotide sequence encoding the mature protein coding sequence of the polypeptides of any one of SEQ ID NO: 147-292, or 439-584. The polynucleotides of the present invention also include, but are not limited to, a polynucleotide that hybridizes under stringent conditions to (a) the complement of any of the nucleotides sequences of SEQ ID NO: 1-146, or 293-438; (b) nucleotide sequences encoding any one of the amino acid sequences set forth in the Sequence Listing as SEQ ID NO: 147-292, or 439-584; (c) a polynucleotide which is an allelic variant of any polynucleotide recited above; (d) a polynucleotide which encodes a species homolog of any of the proteins recited above; or (e) a polynucleotide that encodes a polypeptide comprising a specific domain or truncation of the polypeptides of SEQ ID NO: 147-292, or 439-584. Domains of interest may depend on the nature of the encoded polypeptide; e.g., domains in receptor-like polypeptides include ligand-binding, extracellular, transmembrane, or cytoplasmic domains, or combinations thereof; domains in immunoglobulin-like proteins include the variable immunoglobulin-like domains; domains in enzyme-like polypeptides include catalytic and substrate binding domains; and domains in ligand polypeptides include receptor-binding domains.

[0068] The polynucleotides of the invention include naturally occurring or wholly or partially synthetic DNA, e.g., cDNA and genomic DNA, and RNA, e.g., mRNA. The polynucleotides may include all of the coding region of the cDNA or may represent a portion of the coding region of the cDNA.

[0069] The present invention also provides genes corresponding to the cDNA sequences disclosed herein. The corresponding genes can be isolated in accordance with known methods using the sequence information disclosed herein. Such methods include the preparation of probes or primers from the disclosed sequence information for identification and/or amplification of genes in appropriate genomic libraries or other sources of genomic materials. Further 5′ and 3′ sequence can be obtained using methods known in the art. For example, full length cDNA or genomic DNA that corresponds to any of the polynucleotides of SEQ ID NO: 1-146, or 293-438 can be obtained by screening appropriate cDNA or genomic DNA libraries under suitable hybridization conditions using any of the polynucleotides of SEQ ID NO: 1-146, or 293-438 or a portion thereof as a probe. Alternatively, the polynucleotides of SEQ ID NO: 1-146, or 293-438 may be used as the basis for suitable primer(s) that allow identification and/or amplification of genes in appropriate genomic DNA or cDNA libraries.

[0070] The nucleic acid sequences of the invention can be assembled from ESTs and sequences (including cDNA and genomic sequences) obtained from one or more public databases, such as dbEST, gbpri, and UniGene. The EST sequences can provide identifying sequence information, representative fragment or segment information, or novel segment information for the full-length gene.

[0071] The polynucleotides of the invention also provide polynucleotides including nucleotide sequences that are substantially equivalent to the polynucleotides recited above. Polynucleotides according to the invention can have, e.g., at least about 65%, at least about 70%, at least about 75%, at least about 80%, 81%, 82%, 83%, 84%, more typically at least about 85%, 86%, 87%, 88%, 89%, more typically at least about 90%, 91%, 92%, 93%, 94%, and even more typically at least about 95%, 96%, 97%, 98%, 99%, sequence identity to a polynucleotide recited above.

[0072] Included within the scope of the nucleic acid sequences of the invention are nucleic acid sequence fragments that hybridize under stringent conditions to any of the nucleotide sequences of SEQ ID NO: 1-146, or 293-438, or complements thereof, which fragment is greater than about 5 nucleotides, preferably 7 nucleotides, more preferably greater than 9 nucleotides and most preferably greater than 17 nucleotides. Fragments of, e.g. 15, 17, or 20 nucleotides or more that are selective for (i.e. specifically hybridize to) any one of the polynucleotides of the invention are contemplated. Probes capable of specifically hybridizing to a polynucleotide can differentiate polynucleotide sequences of the invention from other polynucleotide sequences in the same family of genes or can differentiate human genes from genes of other species, and are preferably based on unique nucleotide sequences.

[0073] The sequences falling within the scope of the present invention are not limited to these specific sequences, but also include allelic and species variations thereof. Allelic and species variations can be routinely determined by comparing the sequence provided in SEQ ID NO: 1-146, or 293-438, a representative fragment thereof, or a nucleotide sequence at least 90% identical, preferably 95% identical, to SEQ ID NO: 1-146, or 293-438 with a sequence from another isolate of the same species. Furthermore, to accommodate codon variability, the invention includes nucleic acid molecules coding for the same amino acid sequences as do the specific ORFs disclosed herein. In other words, in the coding region of an ORF, substitution of one codon for another codon that encodes the same amino acid is expressly contemplated.

[0074] The nearest neighbor or homology result for the nucleic acids of the present invention, including SEQ ID NO: 1-146, or 293-438, can be obtained by searching a database using an algorithm or a program. Preferably, a BLAST which stands for Basic Local Alignment Search Tool is used to search for local sequence alignments (Altshul, S. F. J Mol. Evol. 36 290-300 (1993) and Altschul S. F. et al. J. Mol. Biol. 21:403-410 (1990)). Alternatively a FASTA version 3 search against Genpept, using Fastxy algorithm.

[0075] Species homologs (or orthologs) of the disclosed polynucleotides and proteins are also provided by the present invention. Species homologs may be isolated and identified by making suitable probes or primers from the sequences provided herein and screening a suitable nucleic acid source from the desired species.

[0076] The invention also encompasses allelic variants of the disclosed polynucleotides or proteins; that is, naturally-occurring alternative forms of the isolated polynucleotide which also encode proteins which are identical, homologous or related to that encoded by the polynucleotides.

[0077] The nucleic acid sequences of the invention are further directed to sequences which encode variants of the described nucleic acids. These amino acid sequence variants may be prepared by methods known in the art by introducing appropriate nucleotide changes into a native or variant polynucleotide. There are two variables in the construction of amino acid sequence variants: the location of the mutation and the nature of the mutation. Nucleic acids encoding the amino acid sequence variants are preferably constructed by mutating the polynucleotide to encode an amino acid sequence that does not occur in nature. These nucleic acid alterations can be made at sites that differ in the nucleic acids from different species (variable positions) or in highly conserved regions (constant regions). Sites at such locations will typically be modified in series, e.g., by substituting first with conservative choices (e.g., hydrophobic amino acid to a different hydrophobic amino acid) and then with more distant choices (e.g., hydrophobic amino acid to a charged amino acid), and then deletions or insertions may be made at the target site. Amino acid sequence deletions generally range from about 1 to 30 residues, preferably about 1 to 10 residues, and are typically contiguous. Amino acid insertions include amino- and/or carboxyl-terminal fusions ranging in length from one to one hundred or more residues, as well as intrasequence insertions of single or multiple amino acid residues. Intrasequence insertions may range generally from about 1 to 10 amino residues, preferably from 1 to 5 residues. Examples of terminal insertions include the heterologous signal sequences necessary for secretion or for intracellular targeting in different host cells and sequences such as FLAG or poly-histidine sequences useful for purifying the expressed protein.

[0078] In a preferred method, polynucleotides encoding the novel amino acid sequences are changed via site-directed mutagenesis. This method uses oligonucleotide sequences to alter a polynucleotide to encode the desired amino acid variant, as well as sufficient adjacent nucleotides on both sides of the changed amino acid to form a stable duplex on either side of the site of being changed. In general, the techniques of site-directed mutagenesis are well known to those of skill in the art and this technique is exemplified by publications such as, Edelman et al., DNA 2:183 (1983). A versatile and efficient method for producing site-specific changes in a polynucleotide sequence was published by Zoller and Smith, Nucleic Acids Res. 10:6487-6500 (1982). PCR may also be used to create amino acid sequence variants of the novel nucleic acids. When small amounts of template DNA are used as starting material, primer(s) that differs slightly in sequence from the corresponding region in the template DNA can generate the desired amino acid variant. PCR amplification results in a population of product DNA fragments that differ from the polynucleotide template encoding the polypeptide at the position specified by the primer. The product DNA fragments replace the corresponding region in the plasmid and this gives a polynucleotide encoding the desired amino acid variant.

[0079] A further technique for generating amino acid variants is the cassette mutagenesis technique described in Wells et al., Gene 34:315 (1985); and other mutagenesis techniques well known in the art, such as, for example, the techniques in Sambrook et al., supra, and Current Protocols in Molecular Biology, Ausubel et al. Due to the inherent degeneracy of the genetic code, other DNA sequences which encode substantially the same or a functionally equivalent amino acid sequence may be used in the practice of the invention for the cloning and expression of these novel nucleic acids. Such DNA sequences include those which are capable of hybridizing to the appropriate novel nucleic acid sequence under stringent conditions.

[0080] Polynucleotides encoding preferred polypeptide truncations of the invention can be used to generate polynucleotides encoding chimeric or fusion proteins comprising one or more domains of the invention and heterologous protein sequences.

[0081] The polynucleotides of the invention additionally include the complement of any of the polynucleotides recited above. The polynucleotide can be DNA (genomic, cDNA, amplified, or synthetic) or RNA. Methods and algorithms for obtaining such polynucleotides are well known to those of skill in the art and can include, for example, methods for determining hybridization conditions that can routinely isolate polynucleotides of the desired sequence identities.

[0082] In accordance with the invention, polynucleotide sequences comprising the mature protein coding sequences corresponding to any one of SEQ ID NO: 1-146, or 293-438, or functional equivalents thereof, may be used to generate recombinant DNA molecules that direct the expression of that nucleic acid, or a functional equivalent thereof, in appropriate host cells. Also included are the cDNA inserts of any of the clones identified herein.

[0083] A polynucleotide according to the invention can be joined to any of a variety of other nucleotide sequences by well-established recombinant DNA techniques (see Sambrook J et al. (1989) Molecular Cloning: A Laboratory Manual, Cold Spring Harbor Laboratory, N.Y.). Useful nucleotide sequences for joining to polynucleotides include an assortment of vectors, e.g., plasmids, cosmids, lambda phage derivatives, phagemids, and the like, that are well known in the art. Accordingly, the invention also provides a vector including a polynucleotide of the invention and a host cell containing the polynucleotide. In general, the vector contains an origin of replication functional in at least one organism, convenient restriction endonuclease sites, and a selectable marker for the host cell. Vectors according to the invention include expression vectors, replication vectors, probe generation vectors, and sequencing vectors. A host cell according to the invention can be a prokaryotic or eukaryotic cell and can be a unicellular organism or part of a multicellular organism.

[0084] The present invention further provides recombinant constructs comprising a nucleic acid having any of the nucleotide sequences of SEQ ID NO: 1-146, or 293-438 or a fragment thereof or any other polynucleotides of the invention. In one embodiment, the recombinant constructs of the present invention comprise a vector, such as a plasmid or viral vector, into which a nucleic acid having any of the nucleotide sequences of SEQ ID NO: 1-146, or 293-438 or a fragment thereof is inserted, in a forward or reverse orientation. In the case of a vector comprising one of the ORFs of the present invention, the vector may further comprise regulatory sequences, including for example, a promoter, operably linked to the ORF. Large numbers of suitable vectors and promoters are known to those of skill in the art and are commercially available for generating the recombinant constructs of the present invention. The following vectors are provided by way of example. Bacterial: pBs, phagescript, PsiX174, pBluescript SK, pBs KS, pNH8a, pNH16a, pNH18a, pNH46a (Stratagene); pTrc99A, pKK223-3, pKK233-3, pDR540, pRIT5 (Pharmacia). Eukaryotic: pWLneo, pSV2cat, pOG44, PXTI, pSG (Stratagene) pSVK3, pBPV, pMSG, pSVL (Pharmacia).

[0085] The isolated polynucleotide of the invention may be operably linked to an expression control sequence such as the pMT2 or pED expression vectors disclosed in Kaufman et al., Nucleic Acids Res. 19, 4485-4490 (1991), in order to produce the protein recombinantly. Many suitable expression control sequences are known in the art. General methods of expressing recombinant proteins are also known and are exemplified in R. Kaufman, Methods in Enzymology 185, 537-566 (1990). As defined herein “operably linked” means that the isolated polynucleotide of the invention and an expression control sequence are situated within a vector or cell in such a way that the protein is expressed by a host cell which has been transformed (transfected) with the ligated polynucleotide/expression control sequence.

[0086] Promoter regions can be selected from any desired gene using CAT (chloramphenicol transferase) vectors or other vectors with selectable markers. Two appropriate vectors are pKK232-8 and pCM7. Particular named bacterial promoters include lacI, lacZ, T3, T7, gpt, lambda PR, and trc. Eukaryotic promoters include CMV immediate early, HSV thymidine kinase, early and late SV40, LTRs from retrovirus, and mouse metallothionein-I. Selection of the appropriate vector and promoter is well within the level of ordinary skill in the art. Generally, recombinant expression vectors will include origins of replication and selectable markers permitting transformation of the host cell, e.g., the ampicillin resistance gene of E. coli and S. cerevisiae TRP1 gene, and a promoter derived from a highly-expressed gene to direct transcription of a downstream structural sequence. Such promoters can be derived from operons encoding glycolytic enzymes such as 3-phosphoglycerate kinase (PGK), a-factor, acid phosphatase, or heat shock proteins, among others. The heterologous structural sequence is assembled in appropriate phase with translation initiation and termination sequences, and preferably, a leader sequence capable of directing secretion of translated protein into the periplasmic space or extracellular medium. Optionally, the heterologous sequence can encode a fusion protein including an amino terminal identification peptide imparting desired characteristics, e.g., stabilization or simplified purification of expressed recombinant product. Useful expression vectors for bacterial use are constructed by inserting a structural DNA sequence encoding a desired protein together with suitable translation initiation and termination signals in operable reading phase with a functional promoter. The vector will comprise one or more phenotypic selectable markers and an origin of replication to ensure maintenance of the vector and to, if desirable, provide amplification within the host. Suitable prokaryotic hosts for transformation include E. coli, Bacillus subtilis, Salmonella typhimurium and various species within the genera Pseudomonas, Streptomyces, and Staphylococcus, although others may also be employed as a matter of choice.

[0087] As a representative but non-limiting example, useful expression vectors for bacterial use can comprise a selectable marker and bacterial origin of replication derived from commercially available plasmids comprising genetic elements of the well known cloning vector pBR322 (ATCC 37017). Such commercial vectors include, for example, pKK223-3 (Pharmacia Fine Chemicals, Uppsala, Sweden) and GEM 1 (Promega Biotech, Madison, Wis., USA). These pBR322 “backbone” sections are combined with an appropriate promoter and the structural sequence to be expressed. Following transformation of a suitable host strain and growth of the host strain to an appropriate cell density, the selected promoter is induced or derepressed by appropriate means (e.g., temperature shift or chemical induction) and cells are cultured for an additional period. Cells are typically harvested by centrifugation, disrupted by physical or chemical means, and the resulting crude extract retained for further purification.

[0088] Polynucleotides of the invention can also be used to induce immune responses. For example, as described in Fan et al., Nat. Biotech. 17:870-872 (1999), incorporated herein by reference, nucleic acid sequences encoding a polypeptide may be used to generate antibodies against the encoded polypeptide following topical administration of naked plasmid DNA or following injection, and preferably intramuscular injection of the DNA. The nucleic acid sequences are preferably inserted in a recombinant expression vector and may be in the form of naked DNA.

### 4.3 Antisense Nucleic Acids

[0089] Another aspect of the invention pertains to isolated antisense nucleic acid molecules that are hybridizable to or complementary to the nucleic acid molecule comprising the nucleotide sequence of SEQ ID NO: 1-146, or 293-438, or fragments, analogs or derivatives thereof. An “antisense” nucleic acid comprises a nucleotide sequence that is complementary to a “sense” nucleic acid encoding a protein, e.g., complementary to the coding strand of a double-stranded cDNA molecule or complementary to an mRNA sequence. In specific aspects, antisense nucleic acid molecules are provided that comprise a sequence complementary to at least about 10, 25, 50, 100, 250 or 500 nucleotides or an entire coding strand, or to only a portion thereof. Nucleic acid molecules encoding fragments, homologs, derivatives and analogs of a protein of any of SEQ ID NO: 147-292, or 439-584 or antisense nucleic acids complementary to a nucleic acid sequence of SEQ ID NO: 1-146, or 293-138 are additionally provided.

[0090] In one embodiment, an antisense nucleic acid molecule is antisense to a “coding region” of the coding strand of a nucleotide sequence of the invention. The term “coding region” refers to the region of the nucleotide sequence comprising codons which are translated into amino acid residues. In another embodiment, the antisense nucleic acid molecule is antisense to a “noncoding region” of the coding strand of a nucleotide sequence of the invention. The term “noncoding region” refers to 5′ and 3′ sequences which flank the coding region that are not translated into amino acids (i.e., also referred to as 5′ and 3′ untranslated regions).

[0091] Given the coding strand sequences encoding a nucleic acid disclosed herein (e.g., SEQ ID NO: 1-146, or 293-438), antisense nucleic acids of the invention can be designed according to the rules of Watson and Crick or Hoogsteen base pairing. The antisense nucleic acid molecule can be complementary to the entire coding region of an mRNA, but more preferably is an oligonucleotide that is antisense to only a portion of the coding or noncoding region of a mRNA. For example, the antisense oligonucleotide can be complementary to the region surrounding the translation start site of a mRNA. An antisense oligonucleotide can be, for example, about 5, 10, 15, 20, 25, 30, 35, 40, 45 or 50 nucleotides in length. An antisense nucleic acid of the invention can be constructed using chemical synthesis or enzymatic ligation reactions using procedures known in the art. For example, an antisense nucleic acid (e.g., an antisense oligonucleotide) can be chemically synthesized using naturally occurring nucleotides or variously modified nucleotides designed to increase the biological stability of the molecules or to increase the physical stability of the duplex formed between the antisense and sense nucleic acids, e.g., phosphorothioate derivatives and acridine substituted nucleotides can be used.

[0092] Examples of modified nucleotides that can be used to generate the antisense nucleic acid include: 5-fluorouracil, 5-bromouracil, 5-chlorouracil, 5-iodouracil, hypoxanthine, xanthine, 4-acetylcytosine, 5-(carboxyhydroxylmethyl) uracil, 5-carboxymethylaminomethyl-2-thiouridine, 5-carboxymethylaminomethyluracil, dihydrouracil, beta-D-galactosylqueosine, inosine, N6-isopentenyladenine, 1-methylguanine, 1-methylinosine, 2,2-dimethylguanine, 2-methyladenine, 2-methylguanine, 3-methylcytosine, 5-methylcytosine, N6-adenine, 7-methylguanine, 5-methylaminomethyluracil, 5-methoxyaminomethyl-2-thiouracil, beta-D-mannosylqueosine, 5′-methoxycarboxymethyluracil, 5-methoxyuracil, 2-methylthio-N6-isopentenyladenine, uracil-5-oxyacetic acid (v), wybutoxosine, pseudouracil, queosine, 2-thiocytosine, 5-methyl-2-thiouracil, 2-thiouracil, 4-thiouracil, 5-methyluracil, uracil-5-oxyacetic acid methylester, uracil-5-oxyacetic acid (v), 5-methyl-2-thiouracil, 3-(3-amino-3-N-2-carboxypropyl) uracil, (acp3)w, and 2,6-diaminopurine. Alternatively, the antisense nucleic acid can be produced biologically using an expression vector into which a nucleic acid has been subcloned in an antisense orientation (i.e., RNA transcribed from the inserted nucleic acid will be of an antisense orientation to a target nucleic acid of interest, described further in the following subsection).

[0093] The antisense nucleic acid molecules of the invention are typically administered to a subject or generated in situ such that they hybridize with or bind to cellular mRNA and/or genomic DNA encoding a protein according to the invention to thereby inhibit expression of the protein, e.g., by inhibiting transcription and/or translation. The hybridization can be by conventional nucleotide complementarity to form a stable duplex, or, for example, in the case of an antisense nucleic acid molecule that binds to DNA duplexes, through specific interactions in the major groove of the double helix. An example of a route of administration of antisense nucleic acid molecules of the invention includes direct injection at a tissue site. Alternatively, antisense nucleic acid molecules can be modified to target selected cells and then administered systemically. For example, for systemic administration, antisense molecules can be modified such that they specifically bind to receptors or antigens expressed on a selected cell surface, e.g., by linking the antisense nucleic acid molecules to peptides or antibodies that bind to cell surface receptors or antigens. The antisense nucleic acid molecules can also be delivered to cells using the vectors described herein. To achieve sufficient intracellular concentrations of antisense molecules, vector constructs in which the antisense nucleic acid molecule is placed under the control of a strong pol II or pol III promoter are preferred.

[0094] In yet another embodiment, the antisense nucleic acid molecule of the invention is an α-anomeric nucleic acid molecule. An α-anomeric nucleic acid molecule forms specific double-stranded hybrids with complementary RNA in which, contrary to the usual β-units, the strands run parallel to each other (Gaultier et al. (1987) Nucleic Acids Res 15: 6625-6641). The antisense nucleic acid molecule can also comprise a 2′-o-methylribonucleotide (Inoue et al. (1987) Nucleic Acids Res 15: 6131-6148) or a chimeric RNA-DNA analogue (Inoue et al. (1987) FEBS Lett 215: 327-330).

### 4.4 Ribozymes and PNA Moieties

[0095] In still another embodiment, an antisense nucleic acid of the invention is a ribozyme. Ribozymes are catalytic RNA molecules with ribonuclease activity that are capable of cleaving a single-stranded nucleic acid, such as an mRNA, to which they have a complementary region. Thus, ribozymes (e.g., hammerhead ribozymes (described in Haselhoff and Gerlach (1988) Nature 334:585-591)) can be used to catalytically cleave a mRNA transcripts to thereby inhibit translation of a mRNA. A ribozyme having specificity for a nucleic acid of the invention can be designed based upon the nucleotide sequence of a DNA disclosed herein (i.e., SEQ ID NO: 1-146, or 293-438). For example, a derivative of a Tetrahymena L-19 IVS RNA can be constructed in which the nucleotide sequence of the active site is complementary to the nucleotide sequence to be cleaved in an mRNA of SEQ ID NO: 1-146, or 293-438 (see, e.g., Cech et al. U.S. Pat. No. 4,987,071; and Cech et al. U.S. Pat. No. 5,116,742). Alternatively, polynucleotides of the invention can be used to select a catalytic RNA having a specific ribonuclease activity from a pool of RNA molecules. See, e.g., Bartel et al., (1993) Science 261:1411-1418.

[0096] Alternatively, gene expression can be inhibited by targeting nucleotide sequences complementary to the regulatory region (e.g., promoter and/or enhancers) to form triple helical structures that prevent transcription of the gene in target cells. See generally, Helene. (1991) Anticancer Drug Des. 6: 569-84; Helene. et al. (1992) Ann. N.Y. Acad. Sci. 660:27-36; and Maher (1992) Bioassays 14: 807-15.

[0097] In various embodiments, the nucleic acids of the invention can be modified at the base moiety, sugar moiety or phosphate backbone to improve, e.g., the stability, hybridization, or solubility of the molecule. For example, the deoxyribose phosphate backbone of the nucleic acids can be modified to generate peptide nucleic acids (see Hyrup et al. (1996) Bioorg Med Chem 4: 5-23). As used herein, the terms “peptide nucleic acids” or “PNAs” refer to nucleic acid mimics, e.g., DNA mimics, in which the deoxyribose phosphate backbone is replaced by a pseudopeptide backbone and only the four natural nucleobases are retained. The neutral backbone of PNAs has been shown to allow for specific hybridization to DNA and RNA under conditions of low ionic strength. The synthesis of PNA oligomers can be performed using standard solid phase peptide synthesis protocols as described in Hyrup et al. (1996) above; Perry-O'Keefe et al. (1996) PNAS 93: 14670-675.

[0098] PNAs of the invention can be used in therapeutic and diagnostic applications. For example, PNAs can be used as antisense or antigene agents for sequence-specific modulation of gene expression by, e.g., inducing transcription or translation arrest or inhibiting replication. PNAs of the invention can also be used, e.g., in the analysis of single base pair mutations in a gene by, e.g., PNA directed PCR clamping; as artificial restriction enzymes when used in combination with other enzymes, e.g., S1 nucleases (Hyrup B. (1996) above); or as probes or primers for DNA sequence and hybridization (Hyrup et al. (1996), above; Perry-O'Keefe (1996), above).

[0099] In another embodiment, PNAs of the invention can be modified, e.g., to enhance their stability or cellular uptake, by attaching lipophilic or other helper groups to PNA, by the formation of PNA-DNA chimeras, or by the use of liposomes or other techniques of drug delivery known in the art. For example, PNA-DNA chimeras can be generated that may combine the advantageous properties of PNA and DNA. Such chimeras allow DNA recognition enzymes, e.g., RNase H and DNA polymerases, to interact with the DNA portion while the PNA portion would provide high binding affinity and specificity. PNA-DNA chimeras can be linked using linkers of appropriate lengths selected in terms of base stacking, number of bonds between the nucleobases, and orientation (Hyrup (1996) above). The synthesis of PNA-DNA chimeras can be performed as described in Hyrup (1996) above and Finn et al. (1996) Nucl Acids Res 24: 3357-63. For example, a DNA chain can be synthesized on a solid support using standard phosphoramidite coupling chemistry, and modified nucleoside analogs, e.g., 5′-(4methoxytrityl)amino-5′-deoxy-thymidine phosphoramidite, can be used between the PNA and the 5′ end of DNA (Mag et al. (1989) Nucl Acid Res 17: 5973-88). PNA monomers are then coupled in a stepwise manner to produce a chimeric molecule with a 5′ PNA segment and a 3′ DNA segment (Finn et al. (1996) above). Alternatively, chimeric molecules can be synthesized with a 5′ DNA segment and a 3′ PNA segment. See, Petersen et al. (1975) Bioorg Med Chem Lett 5: 1119-11124.

[0100] In other embodiments, the oligonucleotide may include other appended groups such as peptides (e.g., for targeting host cell receptors in vivo), or agents facilitating transport across the cell membrane (see, e.g., Letsinger et al., 1989, Proc. Natl. Acad. Sci. U.S.A. 86:6553-6556; Lemaitre et al., 1987, Proc. Natl. Acad. Sci. 84:648-652; PCT Publication No. WO88/09810) or the blood-brain barrier (see, e.g., PCT Publication No. WO89/10134). In addition, oligonucleotides can be modified with hybridization triggered cleavage agents (See, e.g., Krol et al., 1988, BioTechniques 6:958-976) or intercalating agents. (See, e.g., Zon, 1988, Pharm. Res. 5: 539-549). To this end, the oligonucleotide may be conjugated to another molecule, e.g., a peptide, a hybridization triggered cross-linking agent, a transport agent, a hybridization-triggered cleavage agent, etc.

### 4.5 Hosts

[0101] The present invention further provides host cells genetically engineered to contain the polynucleotides of the invention. For example, such host cells may contain nucleic acids of the invention introduced into the host cell using known transformation, transfection or infection methods. The present invention still further provides host cells genetically engineered to express the polynucleotides of the invention, wherein such polynucleotides are in operative association with a regulatory sequence heterologous to the host cell which drives expression of the polynucleotides in the cell.

[0102] Knowledge of nucleic acid sequences allows for modification of cells to permit, or increase, expression of endogenous polypeptide. Cells can be modified (e.g., by homologous recombination) to provide increased polypeptide expression by replacing, in whole or in part, the naturally occurring promoter with all or part of a heterologous promoter so that the cells express the polypeptide at higher levels. The heterologous promoter is inserted in such a manner that it is operatively linked to the encoding sequences. See, for example, PCT International Publication No. WO94/12650, PCT International Publication No. WO92/20808, and PCT International Publication No. WO91/09955. It is also contemplated that, in addition to heterologous promoter DNA, amplifiable marker DNA (e.g., ada, dhfr, and the multifunctional CAD gene which encodes carbamyl phosphate synthase, aspartate transcarbamylase, and dihydroorotase) and/or intron DNA may be inserted along with the heterologous promoter DNA. If linked to the coding sequence, amplification of the marker DNA by standard selection methods results in co-amplification of the desired protein coding sequences in the cells.

[0103] The host cell can be a higher eukaryotic host cell, such as a mammalian cell, a lower eukaryotic host cell, such as a yeast cell, or the host cell can be a prokaryotic cell, such as a bacterial cell. Introduction of the recombinant construct into the host cell can be effected by calcium phosphate transfection, DEAE-dextran mediated transfection, or electroporation (Davis, L. et al., Basic Methods in Molecular Biology (1986)). The host cells containing one of the polynucleotides of the invention, can be used in conventional manners to produce the gene product encoded by the isolated fragment (in the case of an ORF) or can be used to produce a heterologous protein under the control of the EMF.

[0104] Any host/vector system can be used to express one or more of the ORFs of the present invention. These include, but are not limited to, eukaryotic hosts such as HeLa cells, Cv-1 cell, COS cells, 293 cells, and Sf9 cells, as well as prokaryotic host such as E. coli and B. subtilis. The most preferred cells are those which do not normally express the particular polypeptide or protein or which expresses the polypeptide or protein at low natural level. Mature proteins can be expressed in mammalian cells, yeast, bacteria, or other cells under the control of appropriate promoters. Cell-free translation systems can also be employed to produce such proteins using RNAs derived from the DNA constructs of the present invention. Appropriate cloning and expression vectors for use with prokaryotic and eukaryotic hosts are described by Sambrook, et al., in Molecular Cloning: A Laboratory Manual, Second Edition, Cold Spring Harbor, N.Y. (1989), the disclosure of which is hereby incorporated by reference.

[0105] Various mammalian cell culture systems can also be employed to express recombinant protein. Examples of mammalian expression systems include the COS-7 lines of monkey kidney fibroblasts, described by Gluzman, Cell 23:175 (1981). Other cell lines capable of expressing a compatible vector are, for example, the C127, monkey COS cells, Chinese Hamster Ovary (CHO) cells, human kidney 293 cells, human epidermal A431 cells, human Colo205 cells, 3T3 cells, CV-1 cells, other transformed primate cell lines, normal diploid cells, cell strains derived from in vitro culture of primary tissue, primary explants, HeLa cells, mouse L cells, BHK, HL-60, U937, HaK or Jurkat cells. Mammalian expression vectors will comprise an origin of replication, a suitable promoter and also any necessary ribosome binding sites, polyadenylation site, splice donor and acceptor sites, transcriptional termination sequences, and 5′ flanking nontranscribed sequences. DNA sequences derived from the SV40 viral genome, for example, SV40 origin, early promoter, enhancer, splice, and polyadenylation sites may be used to provide the required nontranscribed genetic elements. Recombinant polypeptides and proteins produced in bacterial culture are usually isolated by initial extraction from cell pellets, followed by one or more salting-out, aqueous ion exchange or size exclusion chromatography steps. Protein refolding steps can be used, as necessary, in completing configuration of the mature protein. Finally, high performance liquid chromatography (HPLC) can be employed for final purification steps. Microbial cells employed in expression of proteins can be disrupted by any convenient method, including freeze-thaw cycling, sonication, mechanical disruption, or use of cell lysing agents.

[0106] Alternatively, it may be possible to produce the protein in lower eukaryotes such as yeast or insects or in prokaryotes such as bacteria. Potentially suitable yeast strains include Saccharomyces cerevisiae, Schizosaccharomyces pombe, Kluyveromyces strains, Candida, or any yeast strain capable of expressing heterologous proteins. Potentially suitable bacterial strains include Escherichia coli, Bacillus subtilis, Salmonella typhimurium, or any bacterial strain capable of expressing heterologous proteins. If the protein is made in yeast or bacteria, it may be necessary to modify the protein produced therein, for example by phosphorylation or glycosylation of the appropriate sites, in order to obtain the functional protein. Such covalent attachments may be accomplished using known chemical or enzymatic methods.

[0107] In another embodiment of the present invention, cells and tissues may be engineered to express an endogenous gene comprising the polynucleotides of the invention under the control of inducible regulatory elements, in which case the regulatory sequences of the endogenous gene may be replaced by homologous recombination. As described herein, gene targeting can be used to replace a gene's existing regulatory region with a regulatory sequence isolated from a different gene or a novel regulatory sequence synthesized by genetic engineering methods. Such regulatory sequences may be comprised of promoters, enhancers, scaffold-attachment regions, negative regulatory elements, transcriptional initiation sites, regulatory protein binding sites or combinations of said sequences. Alternatively, sequences which affect the structure or stability of the RNA or protein produced may be replaced, removed, added, or otherwise modified by targeting. These sequence include polyadenylation signals, mRNA stability elements, splice sites, leader sequences for enhancing or modifying transport or secretion properties of the protein, or other sequences which alter or improve the function or stability of protein or RNA molecules.

[0108] The targeting event may be a simple insertion of the regulatory sequence, placing the gene under the control of the new regulatory sequence, e.g., inserting a new promoter or enhancer or both upstream of a gene. Alternatively, the targeting event may be a simple deletion of a regulatory element, such as the deletion of a tissue-specific negative regulatory element. Alternatively, the targeting event may replace an existing element; for example, a tissue-specific enhancer can be replaced by an enhancer that has broader or different cell-type specificity than the naturally occurring elements. Here, the naturally occurring sequences are deleted and new sequences are added. In all cases, the identification of the targeting event may be facilitated by the use of one or more selectable marker genes that are contiguous with the targeting DNA, allowing for the selection of cells in which the exogenous DNA has integrated into the host cell genome. The identification of the targeting event may also be facilitated by the use of one or more marker genes exhibiting the property of negative selection, such that the negatively selectable marker is linked to the exogenous DNA, but configured such that the negatively selectable marker flanks the targeting sequence, and such that a correct homologous recombination event with sequences in the host cell genome does not result in the stable integration of the negatively selectable marker. Markers useful for this purpose include the Herpes Simplex Virus thymidine kinase (TK) gene or the bacterial xanthine-guanine phosphoribosyl-transferase (gpt) gene.

[0109] The gene targeting or gene activation techniques which can be used in accordance with this aspect of the invention are more particularly described in U.S. Pat. No. 5,272,071 to Chappel; U.S. Pat. No. 5,578,461 to Sherwin et al.; International Application No. PCT/US92/09627 (WO93/09222) by Selden et al.; and International Application No. PCT/US90/06436 (WO91/06667) by Skoultchi et al., each of which is incorporated by reference herein in its entirety.

### 4.6 Polypeptides of the Invention

[0110] The isolated polypeptides of the invention include, but are not limited to, a polypeptide comprising: the amino acid sequences set forth as any one of SEQ ID NO: 147-292, or 439-584 or an amino acid sequence encoded by any one of the nucleotide sequences SEQ ID NO: 1-146, or 293-438 or the corresponding full length or mature protein. Polypeptides of the invention also include polypeptides preferably with biological or immunological activity that are encoded by: (a) a polynucleotide having any one of the nucleotide sequences set forth in SEQ ID NO: 1-146, or 293-438 or (b) polynucleotides encoding any one of the amino acid sequences set forth as SEQ ID NO: 147-292, or 439-584 or (c) polynucleotides that hybridize to the complement of the polynucleotides of either (a) or (b) under stringent hybridization conditions. The invention also provides biologically active or immunologically active variants of any of the amino acid sequences set forth as SEQ ID NO: 147-292, or 439-584 or the corresponding fill length or mature protein; and “substantial equivalents” thereof (e.g., with at least about 65%, at least about 70%, at least about 75%, at least about 80%, at least about 85%, 86%, 87%, 88%, 89%, at least about 90%, 91%, 92%, 93%, 94%, typically at least about 95%, 96%, 97%, more typically at least about 98%, or most typically at least about 99% amino acid identity) that retain biological activity. Polypeptides encoded by allelic variants may have a similar, increased, or decreased activity compared to polypeptides comprising SEQ ID NO: 147-292, or 439-584.

[0111] Fragments of the proteins of the present invention which are capable of exhibiting biological activity are also encompassed by the present invention. Fragments of the protein may be in linear form or they may be cyclized using known methods, for example, as described in H. U. Saragovi, et al., Bio/Technology 10, 773-778 (1992) and in R. S. McDowell, et al., J. Amer. Chem. Soc. 114, 9245-9253 (1992), both of which are incorporated herein by reference. Such fragments may be fused to carrier molecules such as immunoglobulins for many purposes, including increasing the valency of protein binding sites.

[0112] The present invention also provides both full-length and mature forms (for example, without a signal sequence or precursor sequence) of the disclosed proteins. The protein coding sequence is identified in the sequence listing by translation of the disclosed nucleotide sequences. The mature form of such protein may be obtained by expression of a full-length polynucleotide in a suitable mammalian cell or other host cell. The sequence of the mature form of the protein is also determinable from the amino acid sequence of the full-length form. Where proteins of the present invention are membrane bound, soluble forms of the proteins are also provided. In such forms, part or all of the regions causing the proteins to be membrane bound are deleted so that the proteins are fully secreted from the cell in which they are expressed.

[0113] Protein compositions of the present invention may further comprise an acceptable carrier, such as a hydrophilic, e.g., pharmaceutically acceptable, carrier.

[0114] The present invention further provides isolated polypeptides encoded by the nucleic acid fragments of the present invention or by degenerate variants of the nucleic acid fragments of the present invention. By “degenerate variant” is intended nucleotide fragments which differ from a nucleic acid fragment of the present invention (e.g., an ORF) by nucleotide sequence but, due to the degeneracy of the genetic code, encode an identical polypeptide sequence. Preferred nucleic acid fragments of the present invention are the ORFs that encode proteins.

[0115] A variety of methodologies known in the art can be utilized to obtain any one of the isolated polypeptides or proteins of the present invention. At the simplest level, the amino acid sequence can be synthesized using commercially available peptide synthesizers. The synthetically-constructed protein sequences, by virtue of sharing primary, secondary or tertiary structural and/or conformational characteristics with proteins may possess biological properties in common therewith, including protein activity. This technique is particularly useful in producing small peptides and fragments of larger polypeptides. Fragments are useful, for example, in generating antibodies against the native polypeptide. Thus, they may be employed as biologically active or immunological substitutes for natural, purified proteins in screening of therapeutic compounds and in immunological processes for the development of antibodies.

[0116] The polypeptides and proteins of the present invention can alternatively be purified from cells which have been altered to express the desired polypeptide or protein. As used herein, a cell is said to be altered to express a desired polypeptide or protein when the cell, through genetic manipulation, is made to produce a polypeptide or protein which it normally does not produce or which the cell normally produces at a lower level. One skilled in the art can readily adapt procedures for introducing and expressing either recombinant or synthetic sequences into eukaryotic or prokaryotic cells in order to generate a cell which produces one of the polypeptides or proteins of the present invention.

[0117] The invention also relates to methods for producing a polypeptide comprising growing a culture of host cells of the invention in a suitable culture medium, and purifying the protein from the cells or the culture in which the cells are grown. For example, the methods of the invention include a process for producing a polypeptide in which a host cell containing a suitable expression vector that includes a polynucleotide of the invention is cultured under conditions that allow expression of the encoded polypeptide. The polypeptide can be recovered from the culture, conveniently from the culture medium, or from a lysate prepared from the host cells and further purified. Preferred embodiments include those in which the protein produced by such process is a full length or mature form of the protein.

[0118] In an alternative method, the polypeptide or protein is purified from bacterial cells which naturally produce the polypeptide or protein. One skilled in the art can readily follow known methods for isolating polypeptides and proteins in order to obtain one of the isolated polypeptides or proteins of the present invention. These include, but are not limited to, immunochromatography, HPLC, size-exclusion chromatography, ion-exchange chromatography, and immuno-affinity chromatography. See, e.g., Scopes, Protein Purification: Principles and Practice, Springer-Verlag (1994); Sambrook, et al., in Molecular Cloning: A Laboratory Manual; Ausubel et al., Current Protocols in Molecular Biology. Polypeptide fragments that retain biological/immunological activity include fragments comprising greater than about 100 amino acids, or greater than about 200 amino acids, and fragments that encode specific protein domains.

[0119] The purified polypeptides can be used in in vitro binding assays which are well known in the art to identify molecules which bind to the polypeptides. These molecules include but are not limited to, for e.g., small molecules, molecules from combinatorial libraries, antibodies or other proteins. The molecules identified in the binding assay are then tested for antagonist or agonist activity in in vivo tissue culture or animal models that are well known in the art. In brief, the molecules are titrated into a plurality of cell cultures or animals and then tested for either cell/animal death or prolonged survival of the animal/cells.

[0120] In addition, the peptides of the invention or molecules capable of binding to the peptides may be complexed with toxins, e.g., ricin or cholera, or with other compounds that are toxic to cells. The toxin-binding molecule complex is then targeted to a tumor or other cell by the specificity of the binding molecule for SEQ ID NO: 147-292, or 439-584.

[0121] The protein of the invention may also be expressed as a product of transgenic animals, e.g., as a component of the milk of transgenic cows, goats, pigs, or sheep which are characterized by somatic or germ cells containing a nucleotide sequence encoding the protein.

[0122] The proteins provided herein also include proteins characterized by amino acid sequences similar to those of purified proteins but into which modification are naturally provided or deliberately engineered. For example, modifications, in the peptide or DNA sequence, can be made by those skilled in the art using known techniques. Modifications of interest in the protein sequences may include the alteration, substitution, replacement, insertion or deletion of a selected amino acid residue in the coding sequence. For example, one or more of the cysteine residues may be deleted or replaced with another amino acid to alter the conformation of the molecule. Techniques for such alteration, substitution, replacement, insertion or deletion are well known to those skilled in the art (see, e.g., U.S. Pat. No. 4,518,584). Preferably, such alteration, substitution, replacement, insertion or deletion retains the desired activity of the protein. Regions of the protein that are important for the protein function can be determined by various methods known in the art including the alanine-scanning method which involved systematic substitution of single or strings of amino acids with alanine, followed by testing the resulting alanine-containing variant for biological activity. This type of analysis determines the importance of the substituted amino acid(s) in biological activity. Regions of the protein that are important for protein function may be determined by the eMATRIX program.

[0123] Other fragments and derivatives of the sequences of proteins which would be expected to retain protein activity in whole or in part and are useful for screening or other immunological methodologies may also be easily made by those skilled in the art given the disclosures herein. Such modifications are encompassed by the present invention.

[0124] The protein may also be produced by operably linking the isolated polynucleotide of the invention to suitable control sequences in one or more insect expression vectors, and employing an insect expression system. Materials and methods for baculovirus/insect cell expression systems are commercially available in kit form from, e.g., Invitrogen, San Diego, Calif., U.S.A. (the MaxBat™ kit), and such methods are well known in the art, as described in Summers and Smith, Texas Agricultural Experiment Station Bulletin No. 1555 (1987), incorporated herein by reference. As used herein, an insect cell capable of expressing a polynucleotide of the present invention is “transformed.”

[0125] The protein of the invention may be prepared by culturing transformed host cells under culture conditions suitable to express the recombinant protein. The resulting expressed protein may then be purified from such culture (i.e., from culture medium or cell extracts) using known purification processes, such as gel filtration and ion exchange chromatography. The purification of the protein may also include an affinity column containing agents which will bind to the protein; one or more column steps over such affinity resins as concanavalin A-agarose, heparin-toyopearl™ or Cibacrom blue 3GA Sepharose™; one or more steps involving hydrophobic interaction chromatography using such resins as phenyl ether, butyl ether, or propyl ether; or immunoaffinity chromatography.

[0126] Alternatively, the protein of the invention may also be expressed in a form which will facilitate purification. For example, it may be expressed as a fusion protein, such as those of maltose binding protein (MBP), glutathione-S-transferase (GST) or thioredoxin (TRX) or as a His tag. Kits for expression and purification of such fusion proteins are commercially available from New England BioLab (Beverly, Mass.), Pharmacia (Piscataway, N.J.) and Invitrogen, respectively. The protein can also be tagged with an epitope and subsequently purified by using a specific antibody directed to such epitope. One such epitope (“FLAG®”) is commercially available from Kodak (New Haven, Conn.).

[0127] Finally, one or more reverse-phase high performance liquid chromatography (RP-HPLC) steps employing hydrophobic RP-HPLC media, e.g., silica gel having pendant methyl or other aliphatic groups, can be employed to further purify the protein. Some or all of the foregoing purification steps, in various combinations, can also be employed to provide a substantially homogeneous isolated recombinant protein. The protein thus purified is substantially free of other mammalian proteins and is defined in accordance with the present invention as an “isolated protein.”

[0128] The polypeptides of the invention include analogs (variants). This embraces fragments, as well as peptides in which one or more amino acids has been deleted, inserted, or substituted. Also, analogs of the polypeptides of the invention embrace fusions of the polypeptides or modifications of the polypeptides of the invention, wherein the polypeptide or analog is fused to another moiety or moieties, e.g., targeting moiety or another therapeutic agent. Such analogs may exhibit improved properties such as activity and/or stability. Examples of moieties which may be fused to the polypeptide or an analog include, for example, targeting moieties which provide for the delivery of polypeptide to pancreatic cells, e.g., antibodies to pancreatic cells, antibodies to immune cells such as T-cells, monocytes, dendritic cells, granulocytes, etc., as well as receptor and ligands expressed on pancreatic or immune cells. Other moieties which may be fused to the polypeptide include therapeutic agents which are used for treatment, for example, immunosuppressive drugs such as cyclosporin, SK506, azathioprine, CD3 antibodies and steroids. Also, polypeptides may be fused to immune modulators, and other cytokines such as alpha or beta interferon.

### 4.6.1 Determining Polypeptide and Polynucleotide Identity and Similarity

[0129] Preferred identity and/or similarity are designed to give the largest match between the sequences tested. Methods to determine identity and similarity are codified in computer programs including, but are not limited to, the GCG program package, including GAP (Devereux, J., et al., Nucleic Acids Research 12(1):387 (1984); Genetics Computer Group, University of Wisconsin, Madison, Wis.), BLASTP, BLASTN, BLASTX, FASTA (Altschul, S. F. et al., J. Molec. Biol. 215:403-410 (1990), PSI-BLAST (Altschul S. F. et al., Nucleic Acids Res. vol. 25, pp. 3389-3402, herein incorporated by reference), eMatrix software (Wu et al., J. Comp. Biol., Vol. 6, pp. 219-235 (1999), herein incorporated by reference), eMotif software (Nevill-Manning et al, ISMB-97, Vol. 4, pp. 202-209, herein incorporated by reference), pFam software (Sonnhammer et al., Nucleic Acids Res., Vol. 26(1), pp. 320-322 (1998), herein incorporated by reference) and the Kyte-Doolittle hydrophobocity prediction algorithm (J. Mol Biol, 157, pp. 105-31 (1982), incorporated herein by reference). The BLAST programs are publicly available from the National Center for Biotechnology Information (NCBI) and other sources (BLAST Manual, Altschul, S., et al. NCB NLM NIH Bethesda, Md. 20894; Altschul, S., et al., J. Mol. Biol. 215:403-410 (1990).

### 4.7 Chimeric and Fusion Proteins

[0130] The invention also provides chimeric or fusion proteins. As used herein, a “chimeric protein” or “fusion protein” comprises a polypeptide of the invention operatively linked to another polypeptide. Within a fusion protein the polypeptide according to the invention can correspond to all or a portion of a protein according to the invention. In one embodiment, a fusion protein comprises at least one biologically active portion of a protein according to the invention. In another embodiment, a fusion protein comprises at least two biologically active portions of a protein according to the invention. Within the fusion protein, the term “operatively linked” is intended to indicate that the polypeptide according to the invention and the other polypeptide are fused in-frame to each other. The polypeptide can be fused to the N-terminus or C-terminus.

[0131] For example, in one embodiment a fusion protein comprises a polypeptide according to the invention operably linked to the extracellular domain of a second protein. In another embodiment, the fusion protein is a GST-fusion protein in which the polypeptide sequences of the invention are fused to the C-terminus of the GST (i.e., glutathione S-transferase) sequences.

[0132] In another embodiment, the fusion protein is an immunoglobulin fusion protein in which the polypeptide sequences according to the invention comprise one or more domains fused to sequences derived from a member of the immunoglobulin protein family. The immunoglobulin fusion proteins of the invention can be incorporated into pharmaceutical compositions and administered to a subject to inhibit an interaction between a ligand and a protein of the invention on the surface of a cell, to thereby suppress signal transduction in vivo. The immunoglobulin fusion proteins can be used to affect the bioavailability of a cognate ligand. Inhibition of the ligand/protein interaction may be useful therapeutically for both the treatment of proliferative and differentiative disorders, e,g., cancer as well as modulating (e.g., promoting or inhibiting) cell survival. Moreover, the immunoglobulin fusion proteins of the invention can be used as immunogens to produce antibodies in a subject, to purify ligands, and in screening assays to identify molecules that inhibit the interaction of a polypeptide of the invention with a ligand.

[0133] A chimeric or fusion protein of the invention can be produced by standard recombinant DNA techniques. For example, DNA fragments coding for the different polypeptide sequences are ligated together in-frame in accordance with conventional techniques, e.g., by employing blunt-ended or stagger-ended termini for ligation, restriction enzyme digestion to provide for appropriate termini, filling-in of cohesive ends as appropriate, alkaline phosphatase treatment to avoid undesirable joining, and enzymatic ligation. In another embodiment, the fusion gene can be synthesized by conventional techniques including automated DNA synthesizers. Alternatively, PCR amplification of gene fragments can be carried out using anchor primers that give rise to complementary overhangs between two consecutive gene fragments that can subsequently be annealed and reamplified to generate a chimeric gene sequence (see, for example, Ausubel et al. (eds.) CURRENT PROTOCOLS IN MOLECULAR BIOLOGY, John Wiley & Sons, 1992). Moreover, many expression vectors are commercially available that already encode a fusion moiety (e.g., a GST polypeptide). A nucleic acid encoding a polypeptide of the invention can be cloned into such an expression vector such that the fusion moiety is linked in-frame to the protein of the invention.

### 4.8 Gene Therapy

[0134] Mutations in the polynucleotides of the invention may result in loss of normal function of the encoded protein. The invention thus provides gene therapy to restore normal activity of the polypeptides of the invention; or to treat disease states involving polypeptides of the invention. Delivery of a functional gene encoding polypeptides of the invention to appropriate cells is effected ex vivo, in situ, or in vivo by use of vectors, and more particularly viral vectors (e.g., adenovirus, adeno-associated virus, or a retrovirus), or ex viva by use of physical DNA transfer methods (e.g., liposomes or chemical treatments). See, for example, Anderson, Nature, supplement to vol. 392, no. 6679, pp. 25-20 (1998). For additional reviews of gene therapy technology see Friedmann, Science, 244: 1275-1281 (1989); Verna, Scientific American: 68-84 (1990); and Miller, Nature, 357: 455-460 (1992). Introduction of any one of the nucleotides of the present invention or a gene encoding the polypeptides of the present invention can also be accomplished with extrachromosomal substrates (transient expression) or artificial chromosomes (stable expression). Cells may also be cultured ex vivo in the presence of proteins of the present invention in order to proliferate or to produce a desired effect on or activity in such cells. Treated cells can then be introduced in vivo for therapeutic purposes. Alternatively, it is contemplated that in other human disease states, preventing the expression of or inhibiting the activity of polypeptides of the invention will be useful in treating the disease states. It is contemplated that antisense therapy or gene therapy could be applied to negatively regulate the expression of polypeptides of the invention.

[0135] Other methods inhibiting expression of a protein include the introduction of antisense molecules to the nucleic acids of the present invention, their complements, or their translated RNA sequences, by methods known in the art. Further, the polypeptides of the present invention can be inhibited by using targeted deletion methods, or the insertion of a negative regulatory element such as a silencer, which is tissue specific.

[0136] The present invention still further provides cells genetically engineered in vivo to express the polynucleotides of the invention, wherein such polynucleotides are in operative association with a regulatory sequence heterologous to the host cell which drives expression of the polynucleotides in the cell. These methods can be used to increase or decrease the expression of the polynucleotides of the present invention.

[0137] Knowledge of DNA sequences provided by the invention allows for modification of cells to permit, increase, or decrease, expression of endogenous polypeptide. Cells can be modified (e.g., by homologous recombination) to provide increased polypeptide expression by replacing, in whole or in part, the naturally occurring promoter with all or part of a heterologous promoter so that the cells express the protein at higher levels. The heterologous promoter is inserted in such a manner that it is operatively linked to the desired protein encoding sequences. See, for example, PCT International Publication No. WO 94/12650, PCT International Publication No. WO 92/20808, and PCT International Publication No. WO 91/09955. It is also contemplated that, in addition to heterologous promoter DNA, amplifiable marker DNA (e.g., ada, dhfr, and the multifunctional CAD gene which encodes carbamyl phosphate synthase, aspartate transcarbamylase, and dihydroorotase) and/or intron DNA may be inserted along with the heterologous promoter DNA. If linked to the desired protein coding sequence, amplification of the marker DNA by standard selection methods results in co-amplification of the desired protein coding sequences in the cells.

[0138] In another embodiment of the present invention, cells and tissues may be engineered to express an endogenous gene comprising the polynucleotides of the invention under the control of inducible regulatory elements, in which case the regulatory sequences of the endogenous gene may be replaced by homologous recombination. As described herein, gene targeting can be used to replace a gene's existing regulatory region with a regulatory sequence isolated from a different gene or a novel regulatory sequence synthesized by genetic engineering methods. Such regulatory sequences may be comprised of promoters, enhancers, scaffold-attachment regions, negative regulatory elements, transcriptional initiation sites, regulatory protein binding sites or combinations of said sequences. Alternatively, sequences which affect the structure or stability of the RNA or protein produced may be replaced, removed, added, or otherwise modified by targeting. These sequences include polyadenylation signals, mRNA stability elements, splice sites, leader sequences for enhancing or modifying transport or secretion properties of the protein, or other sequences which alter or improve the function or stability of protein or RNA molecules.

[0139] The targeting event may be a simple insertion of the regulatory sequence, placing the gene under the control of the new regulatory sequence, e.g., inserting a new promoter or enhancer or both upstream of a gene. Alternatively, the targeting event may be a simple deletion of a regulatory element, such as the deletion of a tissue-specific negative regulatory element. Alternatively, the targeting event may replace an existing element; for example, a tissue-specific enhancer can be replaced by an enhancer that has broader or different cell-type specificity than the naturally occurring elements. Here, the naturally occurring sequences are deleted and new sequences are added. In all cases, the identification of the targeting event may be facilitated by the use of one or more selectable marker genes that are contiguous with the targeting DNA, allowing for the selection of cells in which the exogenous DNA has integrated into the cell genome. The identification of the targeting event may also be facilitated by the use of one or more marker genes exhibiting the property of negative selection, such that the negatively selectable marker is linked to the exogenous DNA, but configured such that the negatively selectable marker flanks the targeting sequence, and such that a correct homologous recombination event with sequences in the host cell genome does not result in the stable integration of the negatively selectable marker. Markers useful for this purpose include the Herpes Simplex Virus thymidine kinase (TK) gene or the bacterial xanthine-guanine phosphoribosyl-transferase (gpt) gene.

[0140] The gene targeting or gene activation techniques which can be used in accordance with this aspect of the invention are more particularly described in U.S. Pat. No. 5,272,071 to Chappel; U.S. Pat. No. 5,578,461 to Sherwin et al.; International Application No. PCT/US92/09627 (WO93/09222) by Selden et al.; and International Application No. PCT/US90/06436 (WO91/06667) by Skoultchi et al., each of which is incorporated by reference herein in its entirety.

### 4.9 Transgenic Animals

[0141] In preferred methods to determine biological functions of the polypeptides of the invention in vivo, one or more genes provided by the invention are either over expressed or inactivated in the germ line of animals using homologous recombination [Capecchi, Science 244:1288-1292 (1989)]. Animals in which the gene is over expressed, under the regulatory control of exogenous or endogenous promoter elements, are known as transgenic animals. Animals in which an endogenous gene has been inactivated by homologous recombination are referred to as “knockout” animals. Knockout animals, preferably non-human mammals, can be prepared as described in U.S. Pat. No. 5,557,032, incorporated herein by reference. Transgenic animals are useful to determine the roles polypeptides of the invention play in biological processes, and preferably in disease states. Transgenic animals are useful as model systems to identify compounds that modulate lipid metabolism. Transgenic animals, preferably non-human mammals, are produced using methods as described in U.S. Pat. No. 5,489,743 and PCT Publication No. WO94/28122, incorporated herein by reference.

[0142] Transgenic animals can be prepared wherein all or part of a promoter of the polynucleotides of the invention is either activated or inactivated to alter the level of expression of the polypeptides of the invention. Inactivation can be carried out using homologous recombination methods described above. Activation can be achieved by supplementing or even replacing the homologous promoter to provide for increased protein expression. The homologous promoter can be supplemented by insertion of one or more heterologous enhancer elements known to confer promoter activation in a particular tissue.

[0143] The polynucleotides of the present invention also make possible the development, through, e.g., homologous recombination or knock out strategies, of animals that fail to express polypeptides of the invention or that express a variant polypeptide. Such animals are useful as models for studying the in vivo activities of polypeptide as well as for studying modulators of the polypeptides of the invention.

[0144] In preferred methods to determine biological functions of the polypeptides of the invention in vivo, one or more genes provided by the invention are either over expressed or inactivated in the germ line of animals using homologous recombination [Capecchi, Science 244:1288-1292 (1989)]. Animals in which the gene is over expressed, under the regulatory control of exogenous or endogenous promoter elements, are known as transgenic animals. Animals in which an endogenous gene has been inactivated by homologous recombination are referred to as “knockout” animals. Knockout animals, preferably non-human mammals, can be prepared as described in U.S. Pat. No. 5,557,032, incorporated herein by reference. Transgenic animals are useful to determine the roles polypeptides of the invention play in biological processes, and preferably in disease states. Transgenic animals are useful as model systems to identify compounds that modulate lipid metabolism. Transgenic animals, preferably non-human mammals, are produced using methods as described in U.S. Pat. No. 5,489,743 and PCT Publication No. WO94/28122, incorporated herein by reference.

[0145] Transgenic animals can be prepared wherein all or part of the polynucleotides of the invention promoter is either activated or inactivated to alter the level of expression of the polypeptides of the invention. Inactivation can be carried out using homologous recombination methods described above. Activation can be achieved by supplementing or even replacing the homologous promoter to provide for increased protein expression. The homologous promoter can be supplemented by insertion of one or more heterologous enhancer elements known to confer promoter activation in a particular tissue.

### 4.10 Uses and Biological Activity

[0146] The polynucleotides and proteins of the present invention are expected to exhibit one or more of the uses or biological activities (including those associated with assays cited herein) identified herein. Uses or activities described for proteins of the present invention may be provided by administration or use of such proteins or of polynucleotides encoding such proteins (such as, for example, in gene therapies or vectors suitable for introduction of DNA). The mechanism underlying the particular condition or pathology will dictate whether the polypeptides of the invention, the polynucleotides of the invention or modulators (activators or inhibitors) thereof would be beneficial to the subject in need of treatment. Thus, “therapeutic compositions of the invention” include compositions comprising isolated polynucleotides (including recombinant DNA molecules, cloned genes and degenerate variants thereof) or polypeptides of the invention (including full length protein, mature protein and truncations or domains thereof), or compounds and other substances that modulate the overall activity of the target gene products, either at the level of target gene/protein expression or target protein activity. Such modulators include polypeptides, analogs, (variants), including fragments and fusion proteins, antibodies and other binding proteins; chemical compounds that directly or indirectly activate or inhibit the polypeptides of the invention (identified, e.g., via drug screening assays as described herein); antisense polynucleotides and polynucleotides suitable for triple helix formation; and in particular antibodies or other binding partners that specifically recognize one or more epitopes of the polypeptides of the invention.

[0147] The polypeptides of the present invention may likewise be involved in cellular activation or in one of the other physiological pathways described herein.

### 4.10.1 Research Uses and Utilities

[0148] The polynucleotides provided by the present invention can be used by the research community for various purposes. The polynucleotides can be used to express recombinant protein for analysis, characterization or therapeutic use; as markers for tissues in which the corresponding protein is preferentially expressed (either constitutively or at a particular stage of tissue differentiation or development or in disease states); as molecular weight markers on gels; as chromosome markers or tags (when labeled) to identify chromosomes or to map related gene positions; to compare with endogenous DNA sequences in patients to identify potential genetic disorders; as probes to hybridize and thus discover novel, related DNA sequences; as a source of information to derive PCR primers for genetic fingerprinting; as a probe to “subtract-out” known sequences in the process of discovering other novel polynucleotides; for selecting and making oligomers for attachment to a “gene chip” or other support, including for examination of expression patterns; to raise anti-protein antibodies using DNA immunization techniques; and as an antigen to raise anti-DNA antibodies or elicit another immune response. Where the polynucleotide encodes a protein which binds or potentially binds to another protein (such as, for example, in a receptor-ligand interaction), the polynucleotide can also be used in interaction trap assays (such as, for example, that described in Gyuris et al., Cell 75:791-803 (1993)) to identify polynucleotides encoding the other protein with which binding occurs or to identify inhibitors of the binding interaction.

[0149] The polypeptides provided by the present invention can similarly be used in assays to determine biological activity, including in a panel of multiple proteins for high-throughput screening; to raise antibodies or to elicit another immune response; as a reagent (including the labeled reagent) in assays designed to quantitatively determine levels of the protein (or its receptor) in biological fluids; as markers for tissues in which the corresponding polypeptide is preferentially expressed (either constitutively or at a particular stage of tissue differentiation or development or in a disease state); and, of course, to isolate correlative receptors or ligands. Proteins involved in these binding interactions can also be used to screen for peptide or small molecule inhibitors or agonists of the binding interaction.

[0150] Any or all of these research utilities are capable of being developed into reagent grade or kit format for commercialization as research products.

[0151] Methods for performing the uses listed above are well known to those skilled in the art. References disclosing such methods include without limitation “Molecular Cloning: A Laboratory Manual”, 2d ed., Cold Spring Harbor Laboratory Press, Sambrook, J., E. F. Fritsch and T. Maniatis eds., 1989, and “Methods in Enzymology: Guide to Molecular Cloning Techniques”, Academic Press, Berger, S. L. and A. R. Kimmel eds., 1987.

### 4.10.2 Nutritional Uses

[0152] Polynucleotides and polypeptides of the present invention can also be used as nutritional sources or supplements. Such uses include without limitation use as a protein or amino acid supplement, use as a carbon source, use as a nitrogen source and use as a source of carbohydrate. In such cases the polypeptide or polynucleotide of the invention can be added to the feed of a particular organism or can be administered as a separate solid or liquid preparation, such as in the form of powder, pills, solutions, suspensions or capsules. In the case of microorganisms, the polypeptide or polynucleotide of the invention can be added to the medium in or on which the microorganism is cultured.

### 4.10.3 Cytokine and Cell Proliferation/Differentiation Activity

[0153] A polypeptide of the present invention may exhibit activity relating to cytokine, cell proliferation (either inducing or inhibiting) or cell differentiation (either inducing or inhibiting) activity or may induce production of other cytokines in certain cell populations. A polynucleotide of the invention can encode a polypeptide exhibiting such attributes. Many protein factors discovered to date, including all known cytokines, have exhibited activity in one or more factor-dependent cell proliferation assays, and hence the assays serve as a convenient confirmation of cytokine activity. The activity of therapeutic compositions of the present invention is evidenced by any one of a number of routine factor dependent cell proliferation assays for cell lines including, without limitation, 32D, DA2, DA1G, T10, B9, B9/11, BaF3, MC9/G, M+(preB M+), 2E8, RB5, DA1, 123, T1165, HT2, CTLL2, TF-1, Mo7e, CMK, HUVEC, and Caco. Therapeutic compositions of the invention can be used in the following:

[0154] Assays for T-cell or thymocyte proliferation include without limitation those described in: Current Protocols in Immunology, Ed by J. E. Coligan, A. M. Kruisbeek, D. H. Margulies, E. M. Shevach, W. Strober, Pub. Greene Publishing Associates and Wiley-Interscience (Chapter 3, In Vitro assays for Mouse Lymphocyte Function 3.1-3.19; Chapter 7, Immunologic studies in Humans); Takai et al., J. Immunol. 137:3494-3500, 1986; Bertagnolli et al., J. Immunol. 145:1706-1712, 1990; Bertagnolli et al., Cellular Immunology 133:327-341, 1991; Bertagnolli, et al., I. Immunol. 149:3778-3783, 1992; Bowman et al., I. Immunol. 152:1756-1761, 1994.

[0155] Assays for cytokine production and/or proliferation of spleen cells, lymph node cells or thymocytes include, without limitation, those described in: Polyclonal T cell stimulation, Kruisbeek, A. M. and Shevach, E. M. In Current Protocols in Immunology. J. E. e.a. Coligan eds. Vol 1 pp. 3.12.1-3.12.14, John Wiley and Sons, Toronto. 1994; and Measurement of mouse and human interleukin-γ, Schreiber, R. D. In Current Protocols in Immunology. J. E. e.a. Coligan eds. Vol 1 pp. 6.8.1-6.8.8, John Wiley and Sons, Toronto. 1994.

[0156] Assays for proliferation and differentiation of hematopoietic and lymphopoietic cells include, without limitation, those described in: Measurement of Human and Murine Interleukin 2 and Interleukin 4, Bottomly, K., Davis, L. S. and Lipsky, P. E. In Current Protocols in Immunology. J. E. e.a. Coligan eds. Vol 1 pp. 6.3.1-6.3.12, John Wiley and Sons, Toronto. 1991; deVries et al., J. Exp. Med. 173:1205-1211, 1991; Moreau et al., Nature 336:690-692, 1988; Greenberger et al., Proc. Natl. Acad. Sci. U.S.A. 80:2931-2938, 1983; Measurement of mouse and human interleukin 6—Nordan, R. In Current Protocols in Immunology. J. E. Coligan eds. Vol 1 pp. 6.6.1-6.6.5, John Wiley and Sons, Toronto. 1991; Smith et al., Proc. Natl. Aced. Sci. U.S.A. 83:1857-1861, 1986; Measurement of human Interleukin 11—Bennett, F., Giannotti, J., Clark, S. C. and Turner, K. J. In Current Protocols in Immunology. J. E. Coligan eds. Vol 1 pp. 6.15.1 John Wiley and Sons, Toronto. 1991; Measurement of mouse and human Interleukin 9—Ciarletta, A., Giannotti, J., Clark, S. C. and Turner, K. J. In Current Protocols in Immunology. J. E. Coligan eds. Vol 1 pp. 6.13.1, John Wiley and Sons, Toronto. 1991.

[0157] Assays for T-cell clone responses to antigens (which will identify, among others, proteins that affect APC-T cell interactions as well as direct T-cell effects by measuring proliferation and cytokine production) include, without limitation, those described in: Current Protocols in Immunology, Ed by J. E. Coligan, A. M. Kruisbeek, D. H. Margulies, E. M. Shevach, W Strober, Pub. Greene Publishing Associates and Wiley-Interscience (Chapter 3, In Vitro assays for Mouse Lymphocyte Function; Chapter 6, Cytokines and their cellular receptors; Chapter 7, Immunologic studies in Humans); Weinberger et al., Proc. Natl. Acad. Sci. USA 77:6091-6095, 1980; Weinberger et al., Eur. J. Immun. 11:405-411, 1981; Takai et al., J. Immunol. 137:3494-3500, 1986; Takai et al., J. Immunol. 140:508-512, 1988.

### 4.10.4 Stem Cell Growth Factor Activity

[0158] A polypeptide of the present invention may exhibit stem cell growth factor activity and be involved in the proliferation, differentiation and survival of pluripotent and totipotent stem cells including primordial germ cells, embryonic stem cells, hematopoietic stem cells and/or germ line stem cells. Administration of the polypeptide of the invention to stem cells in vivo or ex vivo is expected to maintain and expand cell populations in a totipotential or pluripotential state which would be useful for re-engineering damaged or diseased tissues, transplantation, manufacture of bio-pharmaceuticals and the development of bio-sensors. The ability to produce large quantities of human cells has important working applications for the production of human proteins which currently must be obtained from non-human sources or donors, implantation of cells to treat diseases such as Parkinson's, Alzheimer's and other neurodegenerative diseases; tissues for grafting such as bone marrow, skin, cartilage, tendons, bone, muscle (including cardiac muscle), blood vessels, cornea, neural cells, gastrointestinal cells and others; and organs for transplantation such as kidney, liver, pancreas (including islet cells), heart and lung.

[0159] It is contemplated that multiple different exogenous growth factors and/or cytokines may be administered in combination with the polypeptide of the invention to achieve the desired effect, including any of the growth factors listed herein, other stem cell maintenance factors, and specifically including stem cell factor (SCF), leukemia inhibitory factor (LIF), Flt-3 ligand (Flt-3L), any of the interleukins, recombinant soluble IL-6 receptor fused to IL-6, macrophage inflammatory protein 1-alpha (MIP-1-alpha), G-CSF, GM-CSF, thrombopoietin (TPO), platelet factor 4 (PF-4), platelet-derived growth factor (PDGF), neural growth factors and basic fibroblast growth factor (bFGF).

[0160] Since totipotent stem cells can give rise to virtually any mature cell type, expansion of these cells in culture will facilitate the production of large quantities of mature cells. Techniques for culturing stem cells are known in the art and administration of polypeptides of the invention, optionally with other growth factors and/or cytokines, is expected to enhance the survival and proliferation of the stem cell populations. This can be accomplished by direct administration of the polypeptide of the invention to the culture medium. Alteratively, stroma cells transfected with a polynucleotide that encodes for the polypeptide of the invention can be used as a feeder layer for the stem cell populations in culture or in vivo. Stromal support cells for feeder layers may include embryonic bone marrow fibroblasts, bone marrow stromal cells, fetal liver cells, or cultured embryonic fibroblasts (see U.S. Pat. No. 5,690,926).

[0161] Stem cells themselves can be transfected with a polynucleotide of the invention to induce autocrine expression of the polypeptide of the invention. This will allow for generation of undifferentiated totipotential/pluripotential stem cell lines that are useful as is or that can then be differentiated into the desired mature cell types. These stable cell lines can also serve as a source of undifferentiated totipotential/pluripotential mRNA to create cDNA libraries and templates for polymerase chain reaction experiments. These studies would allow for the isolation and identification of differentially expressed genes in stem cell populations that regulate stem cell proliferation and/or maintenance.

[0162] Expansion and maintenance of totipotent stem cell populations will be useful in the treatment of many pathological conditions. For example, polypeptides of the present invention may be used to manipulate stem cells in culture to give rise to neuroepithelial cells that can be used to augment or replace cells damaged by illness, autoimmune disease, accidental damage or genetic disorders. The polypeptide of the invention may be useful for inducing the proliferation of neural cells and for the regeneration of nerve and brain tissue, i.e. for the treatment of central and peripheral nervous system diseases and neuropathies, as well as mechanical and traumatic disorders which involve degeneration, death or trauma to neural cells or nerve tissue. In addition, the expanded stem cell populations can also be genetically altered for gene therapy purposes and to decrease host rejection of replacement tissues after grafting or implantation.

[0163] Expression of the polypeptide of the invention and its effect on stem cells can also be manipulated to achieve controlled differentiation of the stem cells into more differentiated cell types. A broadly applicable method of obtaining pure populations of a specific differentiated cell type from undifferentiated stem cell populations involves the use of a cell-type specific promoter driving a selectable marker. The selectable marker allows only cells of the desired type to survive. For example, stem cells can be induced to differentiate into cardiomyocytes (Wobus et al., Differentiation, 48: 173-182, (1991); Klug et al., J. Clin. Invest., 98(1): 216-224, (1998)) or skeletal muscle cells (Browder, L. W. In: Principles of Tissue Engineering eds. Lanza et al., Academic Press (1997)). Alternatively, directed differentiation of stem cells can be accomplished by culturing the stem cells in the presence of a differentiation factor such as retinoic acid and an antagonist of the polypeptide of the invention which would inhibit the effects of endogenous stem cell factor activity and allow differentiation to proceed.

[0164] In vitro cultures of stem cells can be used to determine if the polypeptide of the invention exhibits stem cell growth factor activity. Stem cells are isolated from any one of various cell sources (including hematopoietic stem cells and embryonic stem cells) and cultured on a feeder layer, as described by Thompson et al. Proc. Natl. Acad. Sci, U.S.A., 92: 7844-7848 (1995), in the presence of the polypeptide of the invention alone or in combination with other growth factors or cytokines. The ability of the polypeptide of the invention to induce stem cells proliferation is determined by colony formation on semi-solid support e.g. as described by Bernstein et al., Blood, 77: 2316-2321 (1991).

### 4.10.5 Hematopoiesis Regulating Activity

[0165] A polypeptide of the present invention may be involved in regulation of hematopoiesis and, consequently, in the treatment of myeloid or lymphoid cell disorders. Even marginal biological activity in support of colony forming cells or of factor-dependent cell lines indicates involvement in regulating hematopoiesis, e.g. in supporting the growth and proliferation of erythroid progenitor cells alone or in combination with other cytokines, thereby indicating utility, for example, in treating various anemias or for use in conjunction with irradiation/chemotherapy to stimulate the production of erythroid precursors and/or erythroid cells; in supporting the growth and proliferation of myeloid cells such as granulocytes and monocytes/macrophages (i.e., traditional CSF activity) useful, for example, in conjunction with chemotherapy to prevent or treat consequent myelo-suppression; in supporting the growth and proliferation of megakaryocytes and consequently of platelets thereby allowing prevention or treatment of various platelet disorders-such as thrombocytopenia, and generally for use in place of or complimentary to platelet transfusions; and/or in supporting the growth and proliferation of hematopoietic stem cells which are capable of maturing to any and all of the above-mentioned hematopoietic cells and therefore find therapeutic utility in various stem cell disorders (such as those usually treated with transplantation, including, without limitation, aplastic anemia and paroxysmal nocturnal hemoglobinuria), as well as in repopulating the stem cell compartment post irradiation/chemotherapy, either in-vivo or ex-vivo (i.e., in conjunction with bone marrow transplantation or with peripheral progenitor cell transplantation (homologous or heterologous)) as normal cells or genetically manipulated for gene therapy.

[0166] Therapeutic compositions of the invention can be used in the following:

[0167] Suitable assays for proliferation and differentiation of various hematopoietic lines are cited above.

[0168] Assays for embryonic stem cell differentiation (which will identify, among others, proteins that influence embryonic differentiation hematopoiesis) include, without limitation, those described in: Johansson et al. Cellular Biology 15:141-151, 1995; Keller et al., Molecular and Cellular Biology 13:473-486, 1993; McClanahan et al., Blood 81:2903-2915, 1993.

[0169] Assays for stem cell survival and differentiation (which will identify, among others, proteins that regulate lympho-hematopoiesis) include, without limitation, those described in: Methylcellulose colony forming assays, Freshney, M. G. In Culture of Hematopoietic Cells. R. I. Freshney, et al. eds. Vol pp.265-268, Wiley-Liss, Inc., New York, N.Y. 1994; Hirayama et al., Proc. Natl. Acad. Sci. USA 89:5907-5911, 1992; Primitive hematopoietic colony forming cells with high proliferative potential, McNiece, I. K. and Briddell, R. A. In Culture of Hematopoietic Cells. R. I. Freshney, et al. eds. Vol pp. 23-39, Wiley-Liss, Inc., New York, N.Y. 1994; Neben et al., Experimental Hematology 22:353-359, 1994; Cobblestone area forming cell assay, Ploemacher, R. E. In Culture of Hematopoietic Cells. R. I. Freshney, et al. eds. Vol pp. 1-21, Wiley-Liss, Inc., New York, N.Y. 1994; Long term bone marrow cultures in the presence of stromal cells, Spooncer, E., Dexter, M. and Allen, T. In Culture of Hematopoietic Cells. R. I. Freshney, et al. eds. Vol pp. 163-179, Wiley-Liss, Inc., New York, N.Y. 1994; Long term culture initiating cell assay, Sutherland, H. J. In Culture of Hematopoietic Cells. R. I. Freshney, et al. eds. Vol pp. 139-162, Wiley-Liss, Inc., New York, N.Y. 1994.

### 4.10.6 Tissue Growth Activity

[0170] A polypeptide of the present invention also may be involved in bone, cartilage, tendon, ligament and/or nerve tissue growth or regeneration, as well as in wound healing and tissue repair and replacement, and in healing of bums, incisions and ulcers.

[0171] A polypeptide of the present invention which induces cartilage and/or bone growth in circumstances where bone is not normally formed, has application in the healing of bone fractures and cartilage damage or defects in humans and other animals. Compositions of a polypeptide, antibody, binding partner, or other modulator of the invention may have prophylactic use in closed as well as open fracture reduction and also in the improved fixation of artificial joints. De novo bone formation induced by an osteogenic agent contributes to the repair of congenital, trauma induced, or oncologic resection induced craniofacial defects, and also is useful in cosmetic plastic surgery.

[0172] A polypeptide of this invention may also be involved in attracting bone-forming cells, stimulating growth of bone-forming cells, or inducing differentiation of progenitors of bone-forming cells. Treatment of osteoporosis, osteoarthritis, bone degenerative disorders, or periodontal disease, such as through stimulation of bone and/or cartilage repair or by blocking inflammation or processes of tissue destruction (collagenase activity, osteoclast activity, etc.) mediated by inflammatory processes may also be possible using the composition of the invention.

[0173] Another category of tissue regeneration activity that may involve the polypeptide of the present invention is tendon/ligament formation. Induction of tendon/ligament-like tissue or other tissue formation in circumstances where such tissue is not normally formed, has application in the healing of tendon or ligament tears, deformities and other tendon or ligament defects in humans and other animals. Such a preparation employing a tendon/ligament-like tissue inducing protein may have prophylactic use in preventing damage to tendon or ligament tissue, as well as use in the improved fixation of tendon or ligament to bone or other tissues, and in repairing defects to tendon or ligament tissue. De novo tendon/ligament-like tissue formation induced by a composition of the present invention contributes to the repair of congenital, trauma induced, or other tendon or ligament defects of other origin, and is also useful in cosmetic plastic surgery for attachment or repair of tendons or ligaments. The compositions of the present invention may provide environment to attract tendon- or ligament-forming cells, stimulate growth of tendon- or ligament-forming cells, induce differentiation of progenitors of tendon- or ligament-forming cells, or induce growth of tendon/ligament cells or progenitors ex vivo for return in vivo to effect tissue repair. The compositions of the invention may also be useful in the treatment of tendinitis, carpal tunnel syndrome and other tendon or ligament defects. The compositions may also include an appropriate matrix and/or sequestering agent as a carrier as is well known in the art.

[0174] The compositions of the present invention may also be useful for proliferation of neural cells and for regeneration of nerve and brain tissue, i.e. for the treatment of central and peripheral nervous system diseases and neuropathies, as well as mechanical and traumatic disorders, which involve degeneration, death or trauma to neural cells or nerve tissue. More specifically, a composition may be used in the treatment of diseases of the peripheral nervous system, such as peripheral nerve injuries, peripheral neuropathy and localized neuropathies, and central nervous system diseases, such as Alzheimer's, Parkinson's disease, Huntington's disease, amyotrophic lateral sclerosis, and Shy-Drager syndrome. Further conditions which may be treated in accordance with the present invention include mechanical and traumatic disorders, such as spinal cord disorders, head trauma and cerebrovascular diseases such as stroke. Peripheral neuropathies resulting from chemotherapy or other medical therapies may also be treatable using a composition of the invention.

[0175] Compositions of the invention may also be useful to promote better or faster closure of non-healing wounds, including without limitation pressure ulcers, ulcers associated with vascular insufficiency, surgical and traumatic wounds, and the like.

[0176] Compositions of the present invention may also be involved in the generation or regeneration of other tissues, such as organs (including, for example, pancreas, liver, intestine, kidney, skin, endothelium), muscle (smooth, skeletal or cardiac) and vascular (including vascular endothelium) tissue, or for promoting the growth of cells comprising such tissues. Part of the desired effects may be by inhibition or modulation of fibrotic scarring may allow normal tissue to regenerate. A polypeptide of the present invention may also exhibit angiogenic activity.

[0177] A composition of the present invention may also be useful for gut protection or regeneration and treatment of lung or liver fibrosis, reperfusion injury in various tissues, and conditions resulting from systemic cytokine damage.

[0178] A composition of the present invention may also be useful for promoting or inhibiting differentiation of tissues described above from precursor tissues or cells; or for inhibiting the growth of tissues described above.

[0179] Therapeutic compositions of the invention can be used in the following:

[0180] Assays for tissue generation activity include, without limitation, those described in: International Patent Publication No. WO95/16035 (bone, cartilage, tendon); International Patent Publication No. WO95/05846 (nerve, neuronal); International Patent Publication No. WO91/07491 (skin, endothelium).

[0181] Assays for wound healing activity include, without limitation, those described in: Winter, Epidermal Wound Healing, pps. 71-112 (Maibach, H. I. and Rovee, D. T., eds.), Year Book Medical Publishers, Inc., Chicago, as modified by Eaglstein and Mertz, J. Invest. Dermatol 71:382-84 (1978).

### 4.10.7 Immune Stimulating or Suppressing Activity

[0182] A polypeptide of the present invention may also exhibit immune stimulating or immune suppressing activity, including without limitation the activities for which assays are described herein. A polynucleotide of the invention can encode a polypeptide exhibiting such activities. A protein may be useful in the treatment of various immune deficiencies and disorders (including severe combined immunodeficiency (SCID)), e.g., in regulating (up or down) growth and proliferation of T and/or B lymphocytes, as well as effecting the cytolytic activity of NK cells and other cell populations. These immune deficiencies may be genetic or be caused by viral (e.g., HIV) as well as bacterial or fungal infections, or may result from autoimmune disorders. More specifically, infectious diseases causes by viral, bacterial, fungal or other infection may be treatable using a protein of the present invention, including infections by HIV, hepatitis viruses, herpes viruses, mycobacteria, Leishmania spp., malaria spp. and various fungal infections such as candidiasis. Of course, in this regard, proteins of the present invention may also be useful where a boost to the immune system generally may be desirable, i.e., in the treatment of cancer.

[0183] Autoimmune disorders which may be treated using a protein of the present invention include, for example, connective tissue disease, multiple sclerosis, systemic lupus erythematosus, rheumatoid arthritis, autoimmune pulmonary inflammation, Guillain-Barre syndrome, autoimmune thyroiditis, insulin dependent diabetes mellitis, myasthenia gravis, graft-versus-host disease and autoimmune inflammatory eye disease. Such a protein (or antagonists thereof, including antibodies) of the present invention may also to be useful in the treatment of allergic reactions and conditions (e.g., anaphylaxis, serum sickness, drug reactions, food allergies, insect venom allergies, mastocytosis, allergic rhinitis, hypersensitivity pneumonitis, urticaria, angioedema, eczema, atopic dermatitis, allergic contact dermatitis, erythema multiforme, Stevens-Johnson syndrome, allergic conjunctivitis, atopic keratoconjunctivitis, venereal keratoconjunctivitis, giant papillary conjunctivitis and contact allergies), such as asthma (particularly allergic asthma) or other respiratory problems. Other conditions, in which immune suppression is desired (including, for example, organ transplantation), may also be treatable using a protein (or antagonists thereof) of the present invention. The therapeutic effects of the polypeptides or antagonists thereof on allergic reactions can be evaluated by in vivo animals models such as the cumulative contact enhancement test (Lastbom et al., Toxicology 125: 59-66, 1998), skin prick test (Hoffmann et al., Allergy 54: 446-54, 1999), guinea pig skin sensitization test (Vohr et al., Arch. Toxocol. 73: 501-9), and murine local lymph node assay (Kimber et al., J. Toxicol. Environ. Health 53: 563-79).

[0184] Using the proteins of the invention it may also be possible to modulate immune responses, in a number of ways. Down regulation may be in the form of inhibiting or blocking an immune response already in progress or may involve preventing the induction of an immune response. The functions of activated T cells may be inhibited by suppressing T cell responses or by inducing specific tolerance in T cells, or both. Immunosuppression of T cell responses is generally an active, non-antigen-specific, process which requires continuous exposure of the T cells to the suppressive agent. Tolerance, which involves inducing non-responsiveness or anergy in T cells, is distinguishable from immunosuppression in that it is generally antigen-specific and persists after exposure to the tolerizing agent has ceased. Operationally, tolerance can be demonstrated by the lack of a T cell response upon reexposure to specific antigen in the absence of the tolerizing agent.

[0185] Down regulating or preventing one or more antigen functions (including without limitation B lymphocyte antigen functions (such as, for example, B7)), e.g., preventing high level lymphokine synthesis by activated T cells, will be useful in situations of tissue, skin and organ transplantation and in graft-versus-host disease (GVHD). For example, blockage of T cell function should result in reduced tissue destruction in tissue transplantation. Typically, in tissue transplants, rejection of the transplant is initiated through its recognition as foreign by T cells, followed by an immune reaction that destroys the transplant. The administration of a therapeutic composition of the invention may prevent cytokine synthesis by immune cells, such as T cells, and thus acts as an immunosuppressant. Moreover, a lack of costimulation may also be sufficient to anergize the T cells, thereby inducing tolerance in a subject. Induction of long-term tolerance by B lymphocyte antigen-blocking reagents may avoid the necessity of repeated administration of these blocking reagents. To achieve sufficient immunosuppression or tolerance in a subject, it may also be necessary to block the function of a combination of B lymphocyte antigens.

[0186] The efficacy of particular therapeutic compositions in preventing organ transplant rejection or GVHD can be assessed using animal models that are predictive of efficacy in humans. Examples of appropriate systems which can be used include allogeneic cardiac grafts in rats and xenogeneic pancreatic islet cell grafts in mice, both of which have been used to examine the immunosuppressive effects of CTLA4Ig fusion proteins in vivo as described in Lenschow et al., Science 257:789-792 (1992) and Turka et al., Proc. Natl. Acad. Sci USA, 89:11102-11105 (1992). In addition, murine models of GVHD (see Paul ed., Fundamental Immunology, Raven Press, New York, 1989, pp. 846-847) can be used to determine the effect of therapeutic compositions of the invention on the development of that disease.

[0187] Blocking antigen function may also be therapeutically useful for treating autoimmune diseases. Many autoimmune disorders are the result of inappropriate activation of T cells that are reactive against self tissue and which promote the production of cytokines and autoantibodies involved in the pathology of the diseases. Preventing the activation of autoreactive T cells may reduce or eliminate disease symptoms. Administration of reagents which block stimulation of T cells can be used to inhibit T cell activation and prevent production of autoantibodies or T cell-derived cytokines which may be involved in the disease process. Additionally, blocking reagents may induce antigen-specific tolerance of autoreactive T cells which could lead to long-term relief from the disease. The efficacy of blocking reagents in preventing or alleviating autoimmune disorders can be determined using a number of well-characterized animal models of human autoimmune diseases. Examples include murine experimental autoimmune encephalitis, systemic lupus erythmatosis in MRL/lpr/lpr mice or NZB hybrid mice, murine autoimmune collagen arthritis, diabetes mellitus in NOD mice and BB rats, and murine experimental myasthenia gravis (see Paul ed., Fundamental Immunology, Raven Press, New York, 1989, pp. 840-856).

[0188] Upregulation of an antigen function (e.g., a B lymphocyte antigen function), as a means of up regulating immune responses, may also be useful in therapy. Upregulation of immune responses may be in the form of enhancing an existing immune response or eliciting an initial immune response. For example, enhancing an immune response may be useful in cases of viral infection, including systemic viral diseases such as influenza, the common cold, and encephalitis.

[0189] Alternatively, anti-viral immune responses may be enhanced in an infected patient by removing T cells from the patient, costimulating the T cells in vitro with viral antigen-pulsed APCs either expressing a peptide of the present invention or together with a stimulatory form of a soluble peptide of the present invention and reintroducing the in vitro activated T cells into the patient. Another method of enhancing anti-viral immune responses would be to isolate infected cells from a patient, transfect them with a nucleic acid encoding a protein of the present invention as described herein such that the cells express all or a portion of the protein on their surface, and reintroduce the transfected cells into the patient. The infected cells would now be capable of delivering a costimulatory signal to, and thereby activate, T cells in vivo.

[0190] A polypeptide of the present invention may provide the necessary stimulation signal to T cells to induce a T cell mediated immune response against the transfected tumor cells. In addition, tumor cells which lack MHC class I or MHC class II molecules, or which fail to reexpress sufficient mounts of MHC class I or MHC class II molecules, can be transfected with nucleic acid encoding all or a portion of (e.g., a cytoplasmic-domain truncated portion) of an MHC class I alpha chain protein and β₂ microglobulin protein or an MHC class II alpha chain protein and an MHC class II beta chain protein to thereby express MHC class I or MHC class II proteins on the cell surface. Expression of the appropriate class I or class II MHC in conjunction with a peptide having the activity of a B lymphocyte antigen (e.g., B7-1, B7-2, B7-3) induces a T cell mediated immune response against the transfected tumor cell. Optionally, a gene encoding an antisense construct which blocks expression of an MHC class II associated protein, such as the invariant chain, can also be cotransfected with a DNA encoding a peptide having the activity of a B lymphocyte antigen to promote presentation of tumor associated antigens and induce tumor specific immunity. Thus, the induction of a T cell mediated immune response in a human subject may be sufficient to overcome tumor-specific tolerance in the subject.

[0191] The activity of a protein of the invention may, among other means, be measured by the following methods:

[0192] Suitable assays for thymocyte or splenocyte cytotoxicity include, without limitation, those described in: Current Protocols in Immunology, Ed by J. E. Coligan, A. M. Kruisbeek, D. H. Margulies, E. M. Shevach, W. Strober, Pub. Greene Publishing Associates and Wiley-Interscience (Chapter 3, In Vitro assays for Mouse Lymphocyte Function 3.1-3.19; Chapter 7, Immunologic studies in Humans); Herrmann et al., Proc. Natl. Acad. Sci. USA 78:2488-2492, 1981; Herrmann et al., J. Immunol. 128:1968-1974, 1982; Handa et al., J. Immunol. 135:1564-1572, 1985; Takai et al., I. Immunol. 137:3494-3500, 1986; Takai et al., J. Immunol. 140:508-512, 1988; Bowman et al., J. Virology 61:1992-1998; Bertagnolli et al., Cellular Immunology 133:327-341, 1991; Brown et al., J. Immunol. 153:3079-3092, 1994.

[0193] Assays for T-cell-dependent immunoglobulin responses and isotype switching (which will identify, among others, proteins that modulate T-cell dependent antibody responses and that affect Th1/TH2 profiles) include, without limitation, those described in: Maliszewski, J. Immunol. 144:3028-3033, 1990; and Assays for B cell function: In vitro antibody production, Mond, J. J. and Brunswick, M. In Current Protocols in Immunology. J. E. e.a. Coligan eds. Vol 1 pp. 3.8.1-3.8.16, John Wiley and Sons, Toronto. 1994.

[0194] Mixed lymphocyte reaction (MLR) assays (which will identify, among others, proteins that generate predominantly Th1 and CTL responses) include, without limitation, those described in: Current Protocols in Immunology, Ed by J. E. Coligan, A. M. Kruisbeek, D. H. Margulies, E. M. Shevach, W. Strober, Pub. Greene Publishing Associates and Wiley-Interscience (Chapter 3, In Vitro assays for Mouse Lymphocyte Function 3.1-3.19; Chapter 7, Immunologic studies in Humans); Takai et al., J. Immunol. 137:3494-3500, 1986; Takai et al., J. Immunol. 140:508-512, 1988; Bertagnolli et al., J. Immunol. 149:3778-3783, 1992.

[0195] Dendritic cell-dependent assays (which will identify, among others, proteins expressed by dendritic cells that activate naive T-cells) include, without limitation, those described in: Guery et al., J. Immunol. 134:536-544, 1995; Inaba et al., Journal of Experimental Medicine 173:549-559, 1991; Macatonia et al., Journal of Immunology 154:5071-5079, 1995; Porgador et al., Journal of Experimental Medicine 182:255-260, 1995; Nair et al., Journal of Virology 67:4062-4069, 1993; Huang et al., Science 264:961-965, 1994; Macatonia et al., Journal of Experimental Medicine 169:1255-1264, 1989; Bhardwaj et al., Journal of Clinical Investigation 94:797-807, 1994; and Inaba et al., Journal of Experimental Medicine 172:631-640, 1990.

[0196] Assays for lymphocyte survival/apoptosis (which will identify, among others, proteins that prevent apoptosis after superantigen induction and proteins that regulate lymphocyte homeostasis) include, without limitation, those described in: Darzynkiewicz et al., Cytometry 13:795-808, 1992; Gorczyca et al., Leukemia 7:659-670, 1993; Gorczyca et al., Cancer Research 53:1945-1951, 1993; Itoh et al., Cell 66:233-243, 1991; Zacharchuk, Journal of Immunology 145:4037-4045, 1990; Zamai et al., Cytometry 14:891-897, 1993; Gorczyca et al., International Journal of Oncology 1:639-648, 1992.

[0197] Assays for proteins that influence early steps of T-cell commitment and development include, without limitation, those described in: Antica et al., Blood 84:111-117, 1994; Fine et al., Cellular Immunology 155:111-122, 1994; Galy et al., Blood 85:2770-2778, 1995; Toki et al., Proc. Nat. Acad Sci. USA 88:7548-7551, 1991.

### 4.10.8 Activin/Inhibin Activity

[0198] A polypeptide of the present invention may also exhibit activin- or inhibin-related activities. A polynucleotide of the invention may encode a polypeptide exhibiting such characteristics. Inhibins are characterized by their ability to inhibit the release of follicle stimulating hormone (FSH), while activins and are characterized by their ability to stimulate the release of follicle stimulating hormone (FSH). Thus, a polypeptide of the present invention, alone or in heterodimers with a member of the inhibin family, may be useful as a contraceptive based on the ability of inhibins to decrease fertility in female mammals and decrease spermatogenesis in male mammals. Administration of sufficient amounts of other inhibins can induce infertility in these mammals. Alternatively, the polypeptide of the invention, as a homodimer or as a heterodimer with other protein subunits of the inhibin group, may be useful as a fertility inducing therapeutic, based upon the ability of activin molecules in stimulating FSH release from cells of the anterior pituitary. See, for example, U.S. Pat No. 4,798,885. A polypeptide of the invention may also be useful for advancement of the onset of fertility in sexually immature mammals, so as to increase the lifetime reproductive performance of domestic animals such as, but not limited to, cows, sheep and pigs.

[0199] The activity of a polypeptide of the invention may, among other means, be measured by the following methods.

[0200] Assays for activin/inhibin activity include, without limitation, those described in: Vale et al., Endocrinology 91:562-572, 1972; Ling et al., Nature 321:779-782, 1986; Vale et al., Nature 321:776-779, 1986; Mason et al., Nature 318:659-663, 1985; Forage et al., Proc. Natl. Acad. Sci. USA 83:3091-3095, 1986.

### 4.10.9 Chemotactic/Chemokinetic Activity

[0201] A polypeptide of the present invention may be involved in chemotactic or chemokinetic activity for mammalian cells, including, for example, monocytes, fibroblasts, neutrophils, T-cells, mast cells, eosinophils, epithelial and/or endothelial cells. A polynucleotide of the invention can encode a polypeptide exhibiting such attributes. Chemotactic and chemokinetic receptor activation can be used to mobilize or attract a desired cell population to a desired site of action. Chemotactic or chemokinetic compositions (e.g. proteins, antibodies, binding partners, or modulators of the invention) provide particular advantages in treatment of wounds and other trauma to tissues, as well as in treatment of localized infections. For example, attraction of lymphocytes, monocytes or neutrophils to tumors or sites of infection may result in improved immune responses against the tumor or infecting agent.

[0202] A protein or peptide has chemotactic activity for a particular cell population if it can stimulate, directly or indirectly, the directed orientation or movement of such cell population. Preferably, the protein or peptide has the ability to directly stimulate directed movement of cells. Whether a particular protein has chemotactic activity for a population of cells can be readily determined by employing such protein or peptide in any known assay for cell chemotaxis.

[0203] Therapeutic compositions of the invention can be used in the following:

[0204] Assays for chemotactic activity (which will identify proteins that induce or prevent chemotaxis) consist of assays that measure the ability of a protein to induce the migration of cells across a membrane as well as the ability of a protein to induce the adhesion of one cell population to another cell population. Suitable assays for movement and adhesion include, without limitation, those described in: Current Protocols in Immunology, Ed by J. E. Coligan, A. M. Kruisbeek, D. H. Marguiles, E. M. Shevach, W. Strober, Pub. Greene Publishing Associates and Wiley-Interscience (Chapter 6.12, Measurement of alpha and beta Chemokines 6.12.1-6.12.28; Taub et al. J. Clin. Invest. 95:1370-1376, 1995; Lind et al. APMIS 103:140-146, 1995; Muller et al Eur. J. Immunol. 25:1744-1748; Gruber et al. J. of Immunol. 152:5860-5867, 1994; Johnston et al. J. of Immunol. 153:1762-1768, 1994.

### 4.10.10 Hemostatic and Thrombolytic Activity

[0205] A polypeptide of the invention may also be involved in hemostasis or thrombolysis or thrombosis. A polynucleotide of the invention can encode a polypeptide exhibiting such attributes. Compositions may be useful in treatment of various coagulation disorders (including hereditary disorders, such as hemophilias) or to enhance coagulation and other hemostatic events in treating wounds resulting from trauma, surgery or other causes. A composition of the invention may also be useful for dissolving or inhibiting formation of thromboses and for treatment and prevention of conditions resulting therefrom (such as, for example, infarction of cardiac and central nervous system vessels (e.g., stroke).

[0206] Therapeutic compositions of the invention can be used in the following:

[0207] Assay for hemostatic and thrombolytic activity include, without limitation, those described in: Linet et al., J. Clin. Pharmacol. 26:131-140, 1986; Burdick et al., Thrombosis Res. 45:413-419, 1987; Humphrey et al., Fibrinolysis 5:71-79 (1991); Schaub, Prostaglandins 35:467-474, 1988.

### 4.10.11 Cancer Diagnosis and Therapy

[0208] Polypeptides of the invention may be involved in cancer cell generation, proliferation or metastasis. Detection of the presence or amount of polynucleotides or polypeptides of the invention may be useful for the diagnosis and/or prognosis of one or more types of cancer. For example, the presence or increased expression of a polynucleotide/polypeptide of the invention may indicate a hereditary risk of cancer, a precancerous condition, or an ongoing malignancy. Conversely, a defect in the gene or absence of the polypeptide may be associated with a cancer condition. Identification of single nucleotide polymorphisms associated with cancer or a predisposition to cancer may also be useful for diagnosis or prognosis.

[0209] Cancer treatments promote tumor regression by inhibiting tumor cell proliferation, inhibiting angiogenesis (growth of new blood vessels that is necessary to support tumor growth) and/or prohibiting metastasis by reducing tumor cell motility or invasiveness. Therapeutic compositions of the invention may be effective in adult and pediatric oncology including in solid phase tumors/malignancies, locally advanced tumors, human soft tissue sarcomas, metastatic cancer, including lymphatic metastases, blood cell malignancies including multiple myeloma, acute and chronic leukemias, and lymphomas, head and neck cancers including mouth cancer, larynx cancer and thyroid cancer, lung cancers including small cell carcinoma and non-small cell cancers, breast cancers including small cell carcinoma and ductal carcinoma, gastrointestinal cancers including esophageal cancer, stomach cancer, colon cancer, colorectal cancer and polyps associated with colorectal neoplasia, pancreatic cancers, liver cancer, urologic cancers including bladder cancer and prostate cancer, malignancies of the female genital tract including ovarian carcinoma, uterine (including endometrial) cancers, and solid tumor in the ovarian follicle, kidney cancers including renal cell carcinoma, brain cancers including intrinsic brain tumors, neuroblastoma, astrocytic brain tumors, gliomas, metastatic tumor cell invasion in the central nervous system, bone cancers including osteomas, skin cancers including malignant melanoma, tumor progression of human skin keratinocytes, squamous cell carcinoma, basal cell carcinoma, hemangiopericytoma and Karposi's sarcoma.

[0210] Polypeptides, polynucleotides, or modulators of polypeptides of the invention (including inhibitors and stimulators of the biological activity of the polypeptide of the invention) may be administered to treat cancer. Therapeutic compositions can be administered in therapeutically effective dosages alone or in combination with adjuvant cancer therapy such as surgery, chemotherapy, radiotherapy, thermotherapy, and laser therapy, and may provide a beneficial effect, e.g. reducing tumor size, slowing rate of tumor growth, inhibiting metastasis, or otherwise improving overall clinical condition, without necessarily eradicating the cancer.

[0211] The composition can also be administered in therapeutically effective amounts as a portion of an anti-cancer cocktail. An anti-cancer cocktail is a mixture of the polypeptide or modulator of the invention with one or more anti-cancer drugs in addition to a pharmaceutically acceptable carrier for delivery. The use of anti-cancer cocktails as a cancer treatment is routine. Anti-cancer drugs that are well known in the art and can be used as a treatment in combination with the polypeptide or modulator of the invention include: Actinomycin D, Aminoglutethimide, Asparaginase, Bleomycin, Busulfan, Carboplatin, Carmustine, Chlorambucil, Cisplatin (cis-DDP), Cyclophosphamide, Cytarabine HCl (Cytosine arabinoside), Dacarbazine, Dactinomycin, Daunorubicin HCl, Doxorubicin HCl, Estramustine phosphate sodium, Etoposide (V16-213), Floxuridine, 5-Fluorouracil (5-Fu), Flutamide, Hydroxyurea (hydroxycarbamide), Ifosfamide, Interferon Alpha-2a, Interferon Alpha-2b, Leuprolide acetate (LHRH-releasing factor analog), Lomustine, Mechlorethamine HCl (nitrogen mustard), Melphalan, Mercaptopurine, Mesna, Methotrexate (MIX), Mitomycin, Mitoxantrone HCl, Octreotide, Plicamycin, Procarbazine HCl, Streptozocin, Tamoxifen citrate, Thioguanine, Thiotepa, Vinblastine sulfate, Vincristine sulfate, Amsacrine, Azacitidine, Hexamethylmelamine, Interleukin-2, Mitoguazone, Pentostatin, Semustine, Teniposide, and Vindesine sulfate.

[0212] In addition, therapeutic compositions of the invention may be used for prophylactic treatment of cancer. There are hereditary conditions and/or environmental situations (e.g. exposure to carcinogens) known in the art that predispose an individual to developing cancers. Under these circumstances, it may be beneficial to treat these individuals with therapeutically effective doses of the polypeptide of the invention to reduce the risk of developing cancers.

[0213] In vitro models can be used to determine the effective doses of the polypeptide of the invention as a potential cancer treatment. These in vitro models include proliferation assays of cultured tumor cells, growth of cultured tumor cells in soft agar (see Freshney, (1987) Culture of Animal Cells: A Manual of Basic Technique, Wily-Liss, New York, N.Y. Ch 18 and Ch 21), tumor systems in nude mice as described in Giovanella et al., J. Natl. Can. Inst., 52: 921-30 (1974), mobility and invasive potential of tumor cells in Boyden Chamber assays as described in Pilkington et al., Anticancer Res., 17: 4107-9 (1997), and angiogenesis assays such as induction of vascularization of the chick chorioallantoic membrane or induction of vascular endothelial cell migration as described in Ribatta et al., Intl. J. Dev. Biol., 40: 1189-97 (1999) and Li et al., Clin. Exp. Metastasis, 17:423-9 (1999), respectively. Suitable tumor cells lines are available, e.g. from American Type Tissue Culture Collection catalogs.

### 4.10.12 Receptor/Ligand Activity

[0214] A polypeptide of the present invention may also demonstrate activity as receptor, receptor ligand or inhibitor or agonist of receptor/ligand interactions. A polynucleotide of the invention can encode a polypeptide exhibiting such characteristics. Examples of such receptors and ligands include, without limitation, cytokine receptors and their ligands, receptor kinases and their ligands, receptor phosphatases and their ligands, receptors involved in cell-cell interactions and their ligands (including without limitation, cellular adhesion molecules (such as selectins, integrins and their ligands) and receptor/ligand pairs involved in antigen presentation, antigen recognition and development of cellular and humoral immune responses. Receptors and ligands are also useful for screening of potential peptide or small molecule inhibitors of the relevant receptor/ligand interaction. A protein of the present invention (including, without limitation, fragments of receptors and ligands) may themselves be useful as inhibitors of receptor/ligand interactions.

[0215] The activity of a polypeptide of the invention may, among other means, be measured by the following methods:

[0216] Suitable assays for receptor-ligand activity include without limitation those described in: Current Protocols in Immunology, Ed by J. E. Coligan, A. M. Kruisbeek, D. H. Margulies, E. M. Shevach, W. Strober, Pub. Greene Publishing Associates and Wiley-Interscience (Chapter 7.28, Measurement of Cellular Adhesion under static conditions 7.28.1-7.28.22), Takai et al., Proc. Natl. Acad. Sci. USA 84:6864-6868, 1987; Bierer et al., J. Exp. Med. 168:1145-1156, 1988; Rosenstein et al., J. Exp. Med. 169:149-160 1989; Stoltenborg et al., J. Immunol. Methods 175:59-68, 1994; Stitt et al., Cell 80:661-670, 1995.

[0217] By way of example, the polypeptides of the invention may be used as a receptor for a ligand(s) thereby transmitting the biological activity of that ligand(s). Ligands may be identified through binding assays, affinity chromatography, dihybrid screening assays, BIAcore assays, gel overlay assays, or other methods known in the art.

[0218] Studies characterizing drugs or proteins as agonist or antagonist or partial agonists or a partial antagonist require the use of other proteins as competing ligands. The polypeptides of the present invention or ligand(s) thereof may be labeled by being coupled to radioisotopes, colorimetric molecules or a toxin molecules by conventional methods. (“Guide to Protein Purification” Murray P. Deutscher (ed) Methods in Enzymology Vol. 182 (1990) Academic Press, Inc. San Diego). Examples of radioisotopes include, but are not limited to, tritium and carbon-14. Examples of colorimetric molecules include, but are not limited to, fluorescent molecules such as fluorescamine, or rhodamine or other colorimetric molecules. Examples of toxins include, but are not limited, to ricin.

### 4.10.13 Drug Screening

[0219] This invention is particularly useful for screening chemical compounds by using the novel polypeptides or binding fragments thereof in any of a variety of drug screening techniques. The polypeptides or fragments employed in such a test may either be free in solution, affixed to a solid support, borne on a cell surface or located intracellularly. One method of drug screening utilizes eukaryotic or prokaryotic host cells which are stably transformed with recombinant nucleic acids expressing the polypeptide or a fragment thereof. Drugs are screened against such transformed cells in competitive binding assays. Such cells, either in viable or fixed form, can be used for standard binding assays. One may measure, for example, the formation of complexes between polypeptides of the invention or fragments and the agent being tested or examine the diminution in complex formation between the novel polypeptides and an appropriate cell line, which are well known in the art.

[0220] Sources for test compounds that may be screened for ability to bind to or modulate (i.e., increase or decrease) the activity of polypeptides of the invention include (1) inorganic and organic chemical libraries, (2) natural product libraries, and (3) combinatorial libraries comprised of either random or mimetic peptides, oligonucleotides or organic molecules.

[0221] Chemical libraries may be readily synthesized or purchased from a number of commercial sources, and may include structural analogs of known compounds or compounds that are identified as “hits” or “leads” via natural product screening.

[0222] The sources of natural product libraries are microorganisms (including bacteria and fungi), animals, plants or other vegetation, or marine organisms, and libraries of mixtures for screening may be created by: (1) fermentation and extraction of broths from soil, plant or marine microorganisms or (2) extraction of the organisms themselves. Natural product libraries include polyketides, non-ribosomal peptides, and (non-naturally occurring) variants thereof. For a review, see Science 282:63-68 (1998).

[0223] Combinatorial libraries are composed of large numbers of peptides, oligonucleotides or organic compounds and can be readily prepared by traditional automated synthesis methods, PCR, cloning or proprietary synthetic methods. Of particular interest are peptide and oligonucleotide combinatorial libraries. Still other libraries of interest include peptide, protein, peptidomimetic, multiparallel synthetic collection, recombinatorial, and polypeptide libraries. For a review of combinatorial chemistry and libraries created therefrom, see Myers, Curr. Opin. Biotechnol. 8:701-707 (1997). For reviews and examples of peptidomimetic libraries, see Al-Obeidi et al., Mol. Biotechnol, 9(3):205-23 (1998); Hruby et al., Curr Opin Chem Biol, 1(1): 114-19 (1997); Dorner et al., Bioorg Med Chem, 4(5):709-15 (1996) (alkylated dipeptides).

[0224] Identification of modulators through use of the various libraries described herein permits modification of the candidate “hit” (or “lead”) to optimize the capacity of the “hit” to bind a polypeptide of the invention. The molecules identified in the binding assay are then tested for antagonist or agonist activity in in vivo tissue culture or animal models that are well known in the art. In brief, the molecules are titrated into a plurality of cell cultures or animals and then tested for either cell/animal death or prolonged survival of the animal/cells.

[0225] The binding molecules thus identified may be complexed with toxins, e.g., ricin or cholera, or with other compounds that are toxic to cells such as radioisotopes. The toxin-binding molecule complex is then targeted to a tumor or other cell by the specificity of the binding molecule for a polypeptide of the invention. Alternatively, the binding molecules may be complexed with imaging agents for targeting and imaging purposes.

### 4.10.14 Assay for Receptor Activity

[0226] The invention also provides methods to detect specific binding of a polypeptide e.g. a ligand or a receptor. The art provides numerous assays particularly useful for identifying previously unknown binding partners for receptor polypeptides of the invention. For example, expression cloning using mammalian or bacterial cells, or dihybrid screening assays can be used to identify polynucleotides encoding binding partners. As another example, affinity chromatography with the appropriate immobilized polypeptide of the invention can be used to isolate polypeptides that recognize and bind polypeptides of the invention. There are a number of different libraries used for the identification of compounds, and in particular small molecules, that modulate (i.e., increase or decrease) biological activity of a polypeptide of the invention. Ligands for receptor polypeptides of the invention can also be identified by adding exogenous ligands, or cocktails of ligands to two cells populations that are genetically identical except for the expression of the receptor of the invention: one cell population expresses the receptor of the invention whereas the other does not. The response of the two cell populations to the addition of ligands(s) are then compared. Alternatively, an expression library can be co-expressed with the polypeptide of the invention in cells and assayed for an autocrine response to identify potential ligand(s). As still another example, BIAcore assays, gel overlay assays, or other methods known in the art can be used to identify binding partner polypeptides, including, (1) organic and inorganic chemical libraries, (2) natural product libraries, and (3) combinatorial libraries comprised of random peptides, oligonucleotides or organic molecules.

[0227] The role of downstream intracellular signaling molecules in the signaling cascade of the polypeptide of the invention can be determined. For example, a chimeric protein in which the cytoplasmic domain of the polypeptide of the invention is fused to the extracellular portion of a protein, whose ligand has been identified, is produced in a host cell. The cell is then incubated with the ligand specific for the extracellular portion of the chimeric protein, thereby activating the chimeric receptor. Known downstream proteins involved in intracellular signaling can then be assayed for expected modifications i.e. phosphorylation. Other methods known to those in the art can also be used to identify signaling molecules involved in receptor activity.

### 4.10.15 Anti-Inflammatory Activity

[0228] Compositions of the present invention may also exhibit anti-inflammatory activity. The anti-inflammatory activity may be achieved by providing a stimulus to cells involved in the inflammatory response, by inhibiting or promoting cell-cell interactions (such as, for example, cell adhesion), by inhibiting or promoting chemotaxis of cells involved in the inflammatory process, inhibiting or promoting cell extravasation, or by stimulating or suppressing production of other factors which more directly inhibit or promote an inflammatory response. Compositions with such activities can be used to treat inflammatory conditions including chronic or acute conditions), including without limitation intimation associated with infection (such as septic shock, sepsis or systemic inflammatory response syndrome (SIRS)), ischemia-reperfusion injury, endotoxin lethality, arthritis, complement-mediated hyperacute rejection, nephritis, cytokine or chemokine-induced lung injury, inflammatory bowel disease, Crohn's disease or resulting from over production of cytokines such as TNF or IL-1. Compositions of the invention may also be useful to treat anaphylaxis and hypersensitivity to an antigenic substance or material. Compositions of this invention may be utilized to prevent or treat conditions such as, but not limited to, sepsis, acute pancreatitis, endotoxin shock, cytokine induced shock, rheumatoid arthritis, chronic inflammatory arthritis, pancreatic cell damage from diabetes mellitus type 1, graft versus host disease, inflammatory bowel disease, inflamation associated with pulmonary disease, other autoimmune disease or inflammatory disease, an antiproliferative agent such as for acute or chronic mylegenous leukemia or in the prevention of premature labor secondary to intrauterine infections.

### 4.10.16 Leukemias

[0229] Leukemias and related disorders may be treated or prevented by administration of a therapeutic that promotes or inhibits function of the polynucleotides and/or polypeptides of the invention. Such leukemias and related disorders include but are not limited to acute leukemia, acute lymphocytic leukemia, acute myelocytic leukemia, myeloblastic, promyelocytic, myelomonocytic, monocytic, erythroleukemia, chronic leukemia, chronic myelocytic (granulocytic) leukemia and chronic lymphocytic leukemia (for a review of such disorders, see Fishman et al., 1985, Medicine, 2d Ed., J.B. Lippincott Co., Philadelphia).

### 4.10.17 Nervous System Disorders

[0230] Nervous system disorders, involving cell types which can be tested for efficacy of intervention with compounds that modulate the activity of the polynucleotides and/or polypeptides of the invention, and which can be treated upon thus observing an indication of therapeutic utility, include but are not limited to nervous system injuries, and diseases or disorders which result in either a disconnection of axons, a diminution or degeneration of neurons, or demyelination. Nervous system lesions which may be treated in a patient (including human and non-human mammalian patients) according to the invention include but are not limited to the following lesions of either the central (including spinal cord, brain) or peripheral nervous systems:

[0231] (i) traumatic lesions, including lesions caused by physical injury or associated with surgery, for example, lesions which sever a portion of the nervous system, or compression injuries;

[0232] (ii) ischemic lesions, in which a lack of oxygen in a portion of the nervous system results in neuronal injury or death, including cerebral infarction or ischemia, or spinal cord infarction or ischemia;

[0233] (iii) infectious lesions, in which a portion of the nervous system is destroyed or injured as a result of infection, for example, by an abscess or associated with infection by human immunodeficiency virus, herpes zoster, or herpes simplex virus or with Lyme disease, tuberculosis, syphilis;

[0234] (iv) degenerative lesions, in which a portion of the nervous system is destroyed or injured as a result of a degenerative process including but not limited to degeneration associated with Parkinson's disease, Alzheimer's disease, Huntington's chorea, or amyotrophic lateral sclerosis;

[0235] (v) lesions associated with nutritional diseases or disorders, in which a portion of the nervous system is destroyed or injured by a nutritional disorder or disorder of metabolism including but not limited to, vitamin B12 deficiency, folic acid deficiency, Wernicke disease, tobacco-alcohol amblyopia, Marchiafava-Bignami disease (primary degeneration of the corpus callosum), and alcoholic cerebellar degeneration;

[0236] (vi) neurological lesions associated with systemic diseases including but not limited to diabetes (diabetic neuropathy, Bell's palsy), systemic lupus erythematosus, carcinoma, or sarcoidosis;

[0237] (vii) lesions caused by toxic substances including alcohol, lead, or particular neurotoxins; and

[0238] (viii) demyelinated lesions in which a portion of the nervous system is destroyed or injured by a demyelinating disease including but not limited to multiple sclerosis, human immunodeficiency virus-associated myelopathy, transverse myelopathy or various etiologies, progressive multifocal leukoencephalopathy, and central pontine myelinolysis.

[0239] Therapeutics which are useful according to the invention for treatment of a nervous system disorder may be selected by testing for biological activity in promoting the survival or differentiation of neurons. For example, and not by way of limitation, therapeutics which elicit any of the following effects may be useful according to the invention:

[0240] (i) increased survival time of neurons in culture;

[0241] (ii) increased sprouting of neurons in culture or in vivo;

[0242] (iii) increased production of a neuron-associated molecule in culture or in vivo, e.g., choline acetyltransferase or acetylcholinesterase with respect to motor neurons; or

[0243] (iv) decreased symptoms of neuron dysfunction in vivo.

[0244] Such effects may be measured by any method known in the art. In preferred, non-limiting embodiments, increased survival of neurons may be measured by the method set forth in Arakawa et al. (1990, J. Neurosci. 10:3507-3515); increased sprouting of neurons may be detected by methods set forth in Pestronk et al. (1980, Exp. Neurol. 70:65-82) or Brown et al. (1981, Ann. Rev. Neurosci. 4:17-42); increased production of neuron-associated molecules may be measured by bioassay, enzymatic assay, antibody binding, Northern blot assay, etc., depending on the molecule to be measured; and motor neuron dysfunction may be measured by assessing the physical manifestation of motor neuron disorder, e.g., weakness, motor neuron conduction velocity, or functional disability.

[0245] In specific embodiments, motor neuron disorders that may be treated according to the invention include but are not limited to disorders such as infarction, infection, exposure to toxin, trauma, surgical damage, degenerative disease or malignancy that may affect motor neurons as well as other components of the nervous system, as well as disorders that selectively affect neurons such as amyotrophic lateral sclerosis, and including but not limited to progressive spinal muscular atrophy, progressive bulbar palsy, primary lateral sclerosis, infantile and juvenile muscular atrophy, progressive bulbar paralysis of childhood (Fazio-Londe syndrome), poliomyelitis and the post polio syndrome, and Hereditary Motorsensory Neuropathy (Charcot-Marie-Tooth Disease).

### 4.10.18 Other Activities

[0246] A polypeptide of the invention may also exhibit one or more of the following additional activities or effects: inhibiting the growth, infection or function of, or killing, infectious agents, including, without limitation, bacteria, viruses, fungi and other parasites; effecting (suppressing or enhancing) bodily characteristics, including, without limitation, height, weight, hair color, eye color, skin, fat to lean ratio or other tissue pigmentation, or organ or body part size or shape (such as, for example, breast augmentation or diminution, change in bone form or shape); effecting biorhythms or circadian cycles or rhythms; effecting the fertility of male or female subjects; effecting the metabolism, catabolism, anabolism, processing, utilization, storage or elimination of dietary fat, lipid, protein, carbohydrate, vitamins, minerals, co-factors or other nutritional factors or component(s); effecting behavioral characteristics, including, without limitation, appetite, libido, stress, cognition (including cognitive disorders), depression (including depressive disorders) and violent behaviors; providing analgesic effects or other pain reducing effects; promoting differentiation and growth of embryonic stem cells in lineages other than hematopoietic lineages; hormonal or endocrine activity; in the case of enzymes, correcting deficiencies of the enzyme and treating deficiency-related diseases; treatment of hyperproliferative disorders (such as, for example, psoriasis); immunoglobulin-like activity (such as, for example, the ability to bind antigens or complement); and the ability to act as an antigen in a vaccine composition to raise an immune response against such protein or another material or entity which is cross-reactive with such protein.

### 4.10.19 Identification of Polymorphisms

[0247] The demonstration of polymorphisms makes possible the identification of such polymorphisms in human subjects and the pharmacogenetic use of this information for diagnosis and treatment. Such polymorphisms may be associated with, e.g., differential predisposition or susceptibility to various disease states (such as disorders involving inflammation or immune response) or a differential response to drug administration, and this genetic information can be used to tailor preventive or therapeutic treatment appropriately. For example, the existence of a polymorphism associated with a predisposition to inflammation or autoimmune disease makes possible the diagnosis of this condition in humans by identifying the presence of the polymorphism.

[0248] Polymorphisms can be identified in a variety of ways known in the art which all generally involve obtaining a sample from a patient, analyzing DNA from the sample, optionally involving isolation or amplification of the DNA, and identifying the presence of the polymorphism in the DNA. For example, PCR may be used to amplify an appropriate fragment of genomic DNA which may then be sequenced. Alternatively, the DNA may be subjected to allele-specific oligonucleotide hybridization (in which appropriate oligonucleotides are hybridized to the DNA under conditions permitting detection of a single base mismatch) or to a single nucleotide extension assay (in which an oligonucleotide that hybridizes immediately adjacent to the position of the polymorphism is extended with one or more labeled nucleotides). In addition, traditional restriction fragment length polymorphism analysis (using restriction enzymes that provide differential digestion of the genomic DNA depending on the presence or absence of the polymorphism) may be performed. Arrays with nucleotide sequences of the present invention can be used to detect polymorphisms. The array can comprise modified nucleotide sequences of the present invention in order to detect the nucleotide sequences of the present invention. In the alternative, any one of the nucleotide sequences of the present invention can be placed on the array to detect changes from those sequences.

[0249] Alternatively a polymorphism resulting in a change in the amino acid sequence could also be detected by detecting a corresponding change in amino acid sequence of the protein, e.g., by an antibody specific to the variant sequence.

### 4.10.20 Arthritis and Inflammation

[0250] The immunosuppressive effects of the compositions of the invention against rheumatoid arthritis is determined in an experimental animal model system. The experimental model system is adjuvant induced arthritis in rats, and the protocol is described by J. Holoshitz, et at., 1983, Science, 219:56, or by B. Waksman et al., 1963, Int. Arch. Allergy Appl. Immunol., 23:129. Induction of the disease can be caused by a single injection, generally intradermally, of a suspension of killed Mycobacterium tuberculosis in complete Freund's adjuvant (CFA). The route of injection can vary, but rats may be injected at the base of the tail with an adjuvant mixture. The polypeptide is administered in phosphate buffered solution (PBS) at a dose of about 1-5 mg/kg. The control consists of administering PBS only.

[0251] The procedure for testing the effects of the test compound would consist of intradermally injecting killed Mycobacterium tuberculosis in CFA followed by immediately administering the test compound and subsequent treatment every other day until day 24. At 14, 15, 18, 20, 22, and 24 days after injection of Mycobacterium CFA, an overall arthritis score may be obtained as described by J. Holoskitz above. An analysis of the data would reveal that the test compound would have a dramatic affect on the swelling of the joints as measured by a decrease of the arthritis score.

### 4.11 Therapeutic Methods

[0252] The compositions (including polypeptide fragments, analogs, variants and antibodies or other binding partners or modulators including antisense polynucleotides) of the invention have numerous applications in a variety of therapeutic methods. Examples of therapeutic applications include, but are not limited to, those exemplified herein.

### 4.11.1 Example

[0253] One embodiment of the invention is the administration of an effective amount of the polypeptides or other composition of the invention to individuals affected by a disease or disorder that can be modulated by regulating the peptides of the invention. While the mode of administration is not particularly important, parenteral administration is preferred. An exemplary mode of administration is to deliver an intravenous bolus. The dosage of the polypeptides or other composition of the invention will normally be determined by the prescribing physician. It is to be expected that the dosage will vary according to the age, weight, condition and response of the individual patient. Typically, the amount of polypeptide administered per dose will be in the range of about 0.0 μg/kg to 100 mg/kg of body weight, with the preferred dose being about 0.1 μg/kg to 10 mg/kg of patient body weight. For parenteral administration, polypeptides of the invention will be formulated in an injectable form combined with a pharmaceutically acceptable parenteral vehicle. Such vehicles are well known in the art and examples include water, saline, Ringer's solution, dextrose solution, and solutions consisting of small amounts of the human serum albumin. The vehicle may contain minor amounts of additives that maintain the isotonicity and stability of the polypeptide or other active ingredient. The preparation of such solutions is within the skill of the art.

### 4.12 Pharmaceutical Formulations and Routes of Administration

[0254] A protein or other composition of the present invention (from whatever source derived, including without limitation from recombinant and non-recombinant sources and including antibodies and other binding partners of the polypeptides of the invention) may be administered to a patient in need, by itself, or in pharmaceutical compositions where it is mixed with suitable carriers or excipient(s) at doses to treat or ameliorate a variety of disorders. Such a composition may optionally contain (in addition to protein or other active ingredient and a carrier) diluents, fillers, salts, buffers, stabilizers, solubilizers, and other materials well known in the art. The term “pharmaceutically acceptable” means a non-toxic material that does not interfere with the effectiveness of the biological activity of the active ingredient(s). The characteristics of the carrier will depend on the route of administration. The pharmaceutical composition of the invention may also contain cytokines, lymphokines, or other hematopoietic factors such as M-CSF, GM-CSF, TNF, IL-1, IL-2, IL-3, IL-4, IL-5, IL-6, IL-7, IL-8, IL-9, IL-10, IL-11, IL-12, IL-13, IL-14, IL-15, IFN, TNF0, TFN1, TNF2, G-CSF, Meg-CSF, thrombopoietin, stem cell factor, and erythropoietin. In further compositions, proteins of the invention may be combined with other agents beneficial to the treatment of the disease or disorder in question. These agents include various growth factors such as epidermal growth factor (EGF), platelet-derived growth factor (PDGF), transforming growth factors (TGF-α and TGF-β), insulin-like growth factor (IGF), as well as cytokines described herein.

[0255] The pharmaceutical composition may further contain other agents which either enhance the activity of the protein or other active ingredient or complement its activity or use in treatment. Such additional factors and/or agents may be included in the pharmaceutical composition to produce a synergistic effect with protein or other active ingredient of the invention, or to minimize side effects. Conversely, protein or other active ingredient of the present invention may be included in formulations of the particular clotting factor, cytokine, lymphokine, other hematopoietic factor, thrombolytic or anti-thrombotic factor, or anti-inflammatory agent to minimize side effects of the clotting factor, cytokine, lymphokine, other hematopoietic factor, thrombolytic or anti-thrombotic factor, or anti-inflammatory agent (such as IL-1Ra, IL-1 Hy1, IL-1 Hy2, anti-TNF, corticosteroids, immunosuppressive agents). A protein of the present invention may be active in multimers (e.g., heterodimers or homodimers) or complexes with itself or other proteins. As a result, pharmaceutical compositions of the invention may comprise a protein of the invention in such multimeric or complexed form.

[0256] As an alternative to being included in a pharmaceutical composition of the invention including a first protein, a second protein or a therapeutic agent may be concurrently administered with the first protein (e.g., at the same time, or at differing times provided that therapeutic concentrations of the combination of agents is achieved at the treatment site). Techniques for formulation and administration of the compounds of the instant application may be found in “Remington's Pharmaceutical Sciences,” Mack Publishing Co., Easton, Pa., latest edition. A therapeutically effective dose further refers to that amount of the compound sufficient to result in amelioration of symptoms, e.g., treatment, healing, prevention or amelioration of the relevant medical condition, or an increase in rate of treatment, healing, prevention or amelioration of such conditions. When applied to an individual active ingredient, administered alone, a therapeutically effective dose refers to that ingredient alone. When applied to a combination, a therapeutically effective dose refers to combined amounts of the active ingredients that result in the therapeutic effect, whether administered in combination, serially or simultaneously.

[0257] In practicing the method of treatment or use of the present invention, a therapeutically effective amount of protein or other active ingredient of the present invention is administered to a mammal having a condition to be treated. Protein or other active ingredient of the present invention may be administered in accordance with the method of the invention either alone or in combination with other therapies such as treatments employing cytokines, lymphokines or other hematopoietic factors. When co-administered with one or more cytokines, lymphokines or other hematopoietic factors, protein or other active ingredient of the present invention may be administered either simultaneously with the cytokine(s), lymphokine(s), other hematopoietic factor(s), thrombolytic or anti-thrombotic factors, or sequentially. If administered sequentially, the attending physician will decide on the appropriate sequence of administering protein or other active ingredient of the present invention in combination with cytokine(s), lymphokine(s), other hematopoietic factor(s), thrombolytic or anti-thrombotic factors.

### 4.12.1 Routes of Administration

[0258] Suitable routes of administration may, for example, include oral, rectal, transmucosal, or intestinal administration; parenteral delivery, including intramuscular, subcutaneous, intramedullary injections, as well as intrathecal, direct intraventricular, intravenous, intraperitoneal, intranasal, or intraocular injections. Administration of protein or other active ingredient of the present invention used in the pharmaceutical composition or to practice the method of the present invention can be carried out in a variety of conventional ways, such as oral ingestion, inhalation, topical application or cutaneous, subcutaneous, intraperitoneal, parenteral or intravenous injection. Intravenous administration to the patient is preferred.

[0259] Alternately, one may administer the compound in a local rather than systemic manner, for example, via injection of the compound directly into a arthritic joints or in fibrotic tissue, often in a depot or sustained release formulation. In order to prevent the scarring process frequently occurring as complication of glaucoma surgery, the compounds may be administered topically, for example, as eye drops. Furthermore, one may administer the drug in a targeted drug delivery system, for example, in a liposome coated with a specific antibody, targeting, for example, arthritic or fibrotic tissue. The liposomes will be targeted to and taken up selectively by the afflicted tissue.

[0260] The polypeptides of the invention are administered by any route that delivers an effective dosage to the desired site of action. The determination of a suitable route of administration and an effective dosage for a particular indication is within the level of skill in the art. Preferably for wound treatment, one administers the therapeutic compound directly to the site. Suitable dosage ranges for the polypeptides of the invention can be extrapolated from these dosages or from similar studies in appropriate animal models. Dosages can then be adjusted as necessary by the clinician to provide maximal therapeutic benefit.

### 4.12.2 Compositions/Formulations

[0261] Pharmaceutical compositions for use in accordance with the present invention thus may be formulated in a conventional manner using one or more physiologically acceptable carriers comprising excipients and auxiliaries which facilitate processing of the active compounds into preparations which can be used pharmaceutically. These pharmaceutical compositions may be manufactured in a manner that is itself known, e.g., by means of conventional mixing, dissolving, granulating, dragee-making, levigating, emulsifying, encapsulating, entrapping or lyophilizing processes. Proper formulation is dependent upon the route of administration chosen. When a therapeutically effective amount of protein or other active ingredient of the present invention is administered orally, protein or other active ingredient of the present invention will be in the form of a tablet, capsule, powder, solution or elixir. When administered in tablet form, the pharmaceutical composition of the invention may additionally contain a solid carrier such as a gelatin or an adjuvant. The tablet, capsule, and powder contain from about 5 to 95% protein or other active ingredient of the present invention, and preferably from about 25 to 90% protein or other active ingredient of the present invention. When administered in liquid form, a liquid carrier such as water, petroleum, oils of animal or plant origin such as peanut oil, mineral oil, soybean oil, or sesame oil, or synthetic oils may be added. The liquid form of the pharmaceutical composition may further contain physiological saline solution, dextrose or other saccharide solution, or glycols such as ethylene glycol, propylene glycol or polyethylene glycol. When administered in liquid form, the pharmaceutical composition contains from about 0.5 to 90% by weight of protein or other active ingredient of the present invention, and preferably from about 1 to 50% protein or other active ingredient of the present invention.

[0262] When a therapeutically effective amount of protein or other active ingredient of the present invention is administered by intravenous, cutaneous or subcutaneous injection, protein or other active ingredient of the present invention will be in the form of a pyrogen-free, parenterally acceptable aqueous solution. The preparation of such parenterally acceptable protein or other active ingredient solutions, having due regard to pH, isotonicity, stability, and the like, is within the skill in the art. A preferred pharmaceutical composition for intravenous, cutaneous, or subcutaneous injection should contain, in addition to protein or other active ingredient of the present invention, an isotonic vehicle such as Sodium Chloride Injection, Ringer's Injection, Dextrose Injection, Dextrose and Sodium Chloride Injection, Lactated Ringer's Injection, or other vehicle as known in the art. The pharmaceutical composition of the present invention may also contain stabilizers, preservatives, buffers, antioxidants, or other additives known to those of skill in the art For injection, the agents of the invention may be formulated in aqueous solutions, preferably in physiologically compatible buffers such as Hanks's solution, Ringer's solution, or physiological saline buffer. For transmucosal administration, penetrants appropriate to the barrier to be permeated are used in the formulation. Such penetrants are generally known in the art.

[0263] For oral administration, the compounds can be formulated readily by combining the active compounds with pharmaceutically acceptable carriers well known in the art. Such carriers enable the compounds of the invention to be formulated as tablets, pills, dragees, capsules, liquids, gels, syrups, slurries, suspensions and the like, for oral ingestion by a patient to be treated. Pharmaceutical preparations for oral use can be obtained from a solid excipient, optionally grinding a resulting mixture, and processing the mixture of granules, after adding suitable auxiliaries, if desired, to obtain tablets or dragee cores. Suitable excipients are, in particular, fillers such as sugars, including lactose, sucrose, mannitol, or sorbitol; cellulose preparations such as, for example, maize starch, wheat starch, rice starch, potato starch, gelatin, gum tragacanth, methyl cellulose, hydroxypropylmethyl-cellulose, sodium carboxymethylcellulose, and/or polyvinylpyrrolidone (PVP). If desired, disintegrating agents may be added, such as the cross-linked polyvinyl pyrrolidone, agar, or alginic acid or a salt thereof such as sodium alginate. Dragee cores are provided with suitable coatings. For this purpose, concentrated sugar solutions may be used, which may optionally contain gum arabic, talc, polyvinyl pyrrolidone, carbopol gel, polyethylene glycol, and/or titanium dioxide, lacquer solutions, and suitable organic solvents or solvent mixtures. Dyestuffs or pigments may be added to the tablets or dragee coatings for identification or to characterize different combinations of active compound doses.

[0264] Pharmaceutical preparations which can be used orally include push-fit capsules made of gelatin, as well as soft, sealed capsules made of gelatin and a plasticizer, such as glycerol or sorbitol. The push-fit capsules can contain the active ingredients in admixture with filler such as lactose, binders such as starches, and/or lubricants such as talc or magnesium stearate and, optionally, stabilizers. In soft capsules, the active compounds may be dissolved or suspended in suitable liquids, such as fatty oils, liquid paraffin, or liquid polyethylene glycols. In addition, stabilizers may be added. All formulations for oral administration should be in dosages suitable for such administration. For buccal administration, the compositions may take the form of tablets or lozenges formulated in conventional manner.

[0265] For administration by inhalation, the compounds for use according to the present invention are conveniently delivered in the form of an aerosol spray presentation from pressurized packs or a nebuliser, with the use of a suitable propellant, e.g., dichlorodifluoromethane, trichlorofluoromethane, dichlorotetrafluoroethane, carbon dioxide or other suitable gas. In the case of a pressurized aerosol the dosage unit may be determined by providing a valve to deliver a metered amount. Capsules and cartridges of, e.g., gelatin for use in an inhaler or insufflator may be formulated containing a powder mix of the compound and a suitable powder base such as lactose or starch. The compounds may be formulated for parenteral administration by injection, e.g., by bolus injection or continuous infusion. Formulations for injection may be presented in unit dosage form, e.g., in ampules or in multi-dose containers, with an added preservative. The compositions may take such forms as suspensions, solutions or emulsions in oily or aqueous vehicles, and may contain formulatory agents such as suspending, stabilizing and/or dispersing agents.

[0266] Pharmaceutical formulations for parenteral administration include aqueous solutions of the active compounds in water-soluble form. Additionally, suspensions of the active compounds may be prepared as appropriate oily injection suspensions. Suitable lipophilic solvents or vehicles include fatty oils such as sesame oil, or synthetic fatty acid esters, such as ethyl oleate or triglycerides, or liposomes. Aqueous injection suspensions may contain substances which increase the viscosity of the suspension, such as sodium carboxymethyl cellulose, sorbitol, or dextran. Optionally, the suspension may also contain suitable stabilizers or agents which increase the solubility of the compounds to allow for the preparation of highly concentrated solutions. Alternatively, the active ingredient may be in powder form for constitution with a suitable vehicle, e.g., sterile pyrogen-free water, before use.

[0267] The compounds may also be formulated in rectal compositions such as suppositories or retention enemas, e.g., containing conventional suppository bases such as cocoa butter or other glycerides. In addition to the formulations described previously, the compounds may also be formulated as a depot preparation. Such long acting formulations may be administered by implantation (for example subcutaneously or intramuscularly) or by intramuscular injection. Thus, for example, the compounds may be formulated with suitable polymeric or hydrophobic materials (for example as an emulsion in an acceptable oil) or ion exchange resins, or as sparingly soluble derivatives, for example, as a sparingly soluble salt.

[0268] A pharmaceutical carrier for the hydrophobic compounds of the invention is a co-solvent system comprising benzyl alcohol, a nonpolar surfactant, a water-miscible organic polymer, and an aqueous phase. The co-solvent system may be the VPD co-solvent system. VPD is a solution of 3% w/v benzyl alcohol, 8% w/v of the nonpolar surfactant polysorbate 80, and 65% w/v polyethylene glycol 300, made up to volume in absolute ethanol. The VPD co-solvent system (VPD:5W) consists of VPD diluted 1:1 with a 5% dextrose in water solution. This co-solvent system dissolves hydrophobic compounds well, and itself produces low toxicity upon systemic administration. Naturally, the proportions of a co-solvent system may be varied considerably without destroying its solubility and toxicity characteristics. Furthermore, the identity of the co-solvent components may be varied: for example, other low-toxicity nonpolar surfactants may be used instead of polysorbate 80; the fraction size of polyethylene glycol may be varied; other biocompatible polymers may replace polyethylene glycol, e.g. polyvinyl pyrrolidone; and other sugars or polysaccharides may substitute for dextrose. Alternatively, other delivery systems for hydrophobic pharmaceutical compounds may be employed. Liposomes and emulsions are well known examples of delivery vehicles or carriers for hydrophobic drugs. Certain organic solvents such as dimethylsulfoxide also may be employed, although usually at the cost of greater toxicity. Additionally, the compounds may be delivered using a sustained-release system, such as semipermeable matrices of solid hydrophobic polymers containing the therapeutic agent. Various types of sustained-release materials have been established and are well known by those skilled in the art. Sustained-release capsules may, depending on their chemical nature, release the compounds for a few weeks up to over 100 days. Depending on the chemical nature and the biological stability of the therapeutic reagent, additional strategies for protein or other active ingredient stabilization may be employed.

[0269] The pharmaceutical compositions also may comprise suitable solid or gel phase carriers or excipients. Examples of such carriers or excipients include but are not limited to calcium carbonate, calcium phosphate, various sugars, starches, cellulose derivatives, gelatin, and polymers such as polyethylene glycols. Many of the active ingredients of the invention may be provided as salts with pharmaceutically compatible counter ions. Such pharmaceutically acceptable base addition salts are those salts which retain the biological effectiveness and properties of the free acids and which are obtained by reaction with inorganic or organic bases such as sodium hydroxide, magnesium hydroxide, ammonia, trialkylamine, dialkylamine, monoalkylamine, dibasic amino acids, sodium acetate, potassium benzoate, triethanol amine and the like.

[0270] The pharmaceutical composition of the invention may be in the form of a complex of the protein(s) or other active ingredient(s) of present invention along with protein or peptide antigens. The protein and/or peptide antigen will deliver a stimulatory signal to both B and T lymphocytes. B lymphocytes will respond to antigen through their surface immunoglobulin receptor. T lymphocytes will respond to antigen through the T cell receptor (TCR) following presentation of the antigen by MHC proteins. MHC and structurally related proteins including those encoded by class I and class II MHC genes on host cells will serve to present the peptide antigen(s) to T lymphocytes. The antigen components could also be supplied as purified MHC-peptide complexes alone or with co-stimulatory molecules that can directly signal T cells. Alternatively antibodies able to bind surface immunoglobulin and other molecules on B cells as well as antibodies able to bind the TCR and other molecules on T cells can be combined with the pharmaceutical composition of the invention.

[0271] The pharmaceutical composition of the invention may be in the form of a liposome in which protein of the present invention is combined, in addition to other pharmaceutically acceptable carriers, with amphipathic agents such as lipids which exist in aggregated form as micelles, insoluble monolayers, liquid crystals, or lamellar layers in aqueous solution. Suitable lipids for liposomal formulation include, without limitation, monoglycerides, diglycerides, sulfatides, lysolecithins, phospholipids, saponin, bile acids, and the like. Preparation of such liposomal formulations is within the level of skill in the art, as disclosed, for example, in U.S. Pat. Nos. 4,235,871; 4,501,728; 4,837,028; and 4,737,323, all of which are incorporated herein by reference.

[0272] The amount of protein or other active ingredient of the present invention in the pharmaceutical composition of the present invention will depend upon the nature and severity of the condition being treated, and on the nature of prior treatments which the patient has undergone. Ultimately, the attending physician will decide the amount of protein or other active ingredient of the present invention with which to treat each individual patient. Initially, the attending physician will administer low doses of protein or other active ingredient of the present invention and observe the patient's response. Larger doses of protein or other active ingredient of the present invention may be administered until the optimal therapeutic effect is obtained for the patient, and at that point the dosage is not increased further. It is contemplated that the various pharmaceutical compositions used to practice the method of the present invention should contain about 0.01 μg to about 100 mg (preferably about 0.1 μg to about 10 mg, more preferably about 0.1 μg to about 1 mg) of protein or other active ingredient of the present invention per kg body weight. For compositions of the present invention which are useful for bone, cartilage, tendon or ligament regeneration, the therapeutic method includes administering the composition topically, systematically, or locally as an implant or device. When administered, the therapeutic composition for use in this invention is, of course, in a pyrogen-free, physiologically acceptable form. Further, the composition may desirably be encapsulated or injected in a viscous form for delivery to the site of bone, cartilage or tissue damage. Topical administration may be suitable for wound healing and tissue repair. Therapeutically useful agents other than a protein or other active ingredient of the invention which may also optionally be included in the composition as described above, may alternatively or additionally, be administered simultaneously or sequentially with the composition in the methods of the invention. Preferably for bone and/or cartilage formation, the composition would include a matrix capable of delivering the protein-containing or other active ingredient-containing composition to the site of bone and/or cartilage damage, providing a structure for the developing bone and cartilage and optimally capable of being resorbed into the body. Such matrices may be formed of materials presently in use for other implanted medical applications.

[0273] The choice of matrix material is based on biocompatibility, biodegradability, mechanical properties, cosmetic appearance and interface properties. The particular application of the compositions will define the appropriate formulation. Potential matrices for the compositions may be biodegradable and chemically defined calcium sulfate, tricalcium phosphate, hydroxyapatite, polylactic acid, polyglycolic acid and polyanhydrides. Other potential materials are biodegradable and biologically well-defined, such as bone or dermal collagen. Further matrices are comprised of pure proteins or extracellular matrix components. Other potential matrices are nonbiodegradable and chemically defined, such as sintered hydroxyapatite, bioglass, aluminates, or other ceramics. Matrices may be comprised of combinations of any of the above mentioned types of material, such as polylactic acid and hydroxyapatite or collagen and tricalcium phosphate. The bioceramics may be altered in composition, such as in calcium-aluminate-phosphate and processing to alter pore size, particle size, particle shape, and biodegradability. Presently preferred is a 50:50 (mole weight) copolymer of lactic acid and glycolic acid in the form of porous particles having diameters ranging from 150 to 800 microns. In some applications, it will be useful to utilize a sequestering agent, such as carboxymethyl cellulose or autologous blood clot, to prevent the protein compositions from disassociating from the matrix.

[0274] A preferred family of sequestering agents is cellulosic materials such as alkylcelluloses (including hydroxyalkylcelluloses), including methylcellulose, ethylcellulose, hydroxyethylcellulose, hydroxypropylcellulose, hydroxypropyl-methylcellulose, and carboxymethylcellulose, the most preferred being cationic salts of carboxymethylcellulose (CMC). Other preferred sequestering agents include hyaluronic acid, sodium alginate, poly(ethylene glycol), polyoxyethylene oxide, carboxyvinyl polymer and poly(vinyl alcohol). The amount of sequestering agent useful herein is 0.5-20 wt %, preferably 1-10 wt % based on total formulation weight, which represents the amount necessary to prevent desorption of the protein from the polymer matrix and to provide appropriate handling of the composition, yet not so much that the progenitor cells are prevented from infiltrating the matrix, thereby providing the protein the opportunity to assist the osteogenic activity of the progenitor cells. In further compositions, proteins or other active ingredients of the invention may be combined with other agents beneficial to the treatment of the bone and/or cartilage defect, wound, or tissue in question. These agents include various growth factors such as epidermal growth factor (EGF), platelet derived growth factor (PDGF), transforming growth factors (TGF-αand TGF-β, and insulin-like growth factor (IGF).

[0275] The therapeutic compositions are also presently valuable for veterinary applications. Particularly domestic animals and thoroughbred horses, in addition to humans, are desired patients for such treatment with proteins or other active ingredients of the present invention. The dosage regimen of a protein-containing pharmaceutical composition to be used in tissue regeneration will be determined by the attending physician considering various factors which modify the action of the proteins, e.g., amount of tissue weight desired to be formed, the site of damage, the condition of the damaged tissue, the size of a wound, type of damaged tissue (e.g., bone), the patient's age, sex, and diet, the severity of any infection, time of administration and other clinical factors. The dosage may vary with the type of matrix used in the reconstitution and with inclusion of other proteins in the pharmaceutical composition. For example, the addition of other known growth factors, such as IGF I (insulin like growth factor I), to the final composition, may also effect the dosage. Progress can be monitored by periodic assessment of tissue/bone growth and/or repair, for example, X-rays, histomorphometric determinations and tetracycline labeling.

[0276] Polynucleotides of the present invention can also be used for gene therapy. Such polynucleotides can be introduced either in vivo or ex vivo into cells for expression in a mammalian subject. Polynucleotides of the invention may also be administered by other known methods for introduction of nucleic acid into a cell or organism (including, without limitation, in the form of viral vectors or naked DNA). Cells may also be cultured ex vivo in the presence of proteins of the present invention in order to proliferate or to produce a desired effect on or activity in such cells. Treated cells can then be introduced in vivo for therapeutic purposes.

### 4.12.3 Effective Dosage

[0277] Pharmaceutical compositions suitable for use in the present invention include compositions wherein the active ingredients are contained in an effective amount to achieve its intended purpose. More specifically, a therapeutically effective amount means an amount effective to prevent development of or to alleviate the existing symptoms of the subject being treated. Determination of the effective amount is well within the capability of those skilled in the art, especially in light of the detailed disclosure provided herein. For any compound used in the method of the invention, the therapeutically effective dose can be estimated initially from appropriate in vitro assays. For example, a dose can be formulated in animal models to achieve a circulating concentration range that can be used to more accurately determine useful doses in humans. For example, a dose can be formulated in animal models to achieve a circulating concentration range that includes the IC₅₀ as determined in cell culture (i.e., the concentration of the test compound which achieves a half-maximal inhibition of the protein's biological activity). Such information can be used to more accurately determine useful doses in humans.

[0278] A therapeutically effective dose refers to that amount of the compound that results in amelioration of symptoms or a prolongation of survival in a patient. Toxicity and therapeutic efficacy of such compounds can be determined by standard pharmaceutical procedures in cell cultures or experimental animals, e.g., for determining the LD₅₀ (the dose lethal to 50% of the population) and the ED₅₀ (the dose therapeutically effective in 50% of the population). The dose ratio between toxic and therapeutic effects is the therapeutic index and it can be expressed as the ratio between LD₅₀ and ED₅₀. Compounds which exhibit high therapeutic indices are preferred. The data obtained from these cell culture assays and animal studies can be used in formulating a range of dosage for use in human. The dosage of such compounds lies preferably within a range of circulating concentrations that include the ED₅₀ with little or no toxicity. The dosage may vary within this range depending upon the dosage form employed and the route of administration utilized. The exact formulation, route of administration and dosage can be chosen by the individual physician in view of the patient's condition. See, e.g., Fingl et al., 1975, in “The Pharmacological Basis of Therapeutics”, Ch. 1 p. 1. Dosage amount and interval may be adjusted individually to provide plasma levels of the active moiety which are sufficient to maintain the desired effects, or minimal effective concentration (MEC). The MEC will vary for each compound but can be estimated from in vitro data. Dosages necessary to achieve the MEC will depend on individual characteristics and route of administration. However, HPLC assays or bioassays can be used to determine plasma concentrations.

[0279] Dosage intervals can also be determined using MEC value. Compounds should be administered using a regimen which maintains plasma levels above the MEC for 10-90% of the time, preferably between 30-90% and most preferably between 50-90%. In cases of local administration or selective uptake, the effective local concentration of the drug may not be related to plasma concentration.

[0280] An exemplary dosage regimen for polypeptides or other compositions of the invention will be in the range of about 0.01 μg/kg to 100 mg/kg of body weight daily, with the preferred dose being about 0.1 μg/kg to 25 mg/kg of patient body weight daily, varying in adults and children. Dosing may be once daily, or equivalent doses may be delivered at longer or shorter intervals.

[0281] The amount of composition administered will, of course, be dependent on the subject being treated, on the subject's age and weight, the severity of the affliction, the manner of administration and the judgment of the prescribing physician.

### 4.12.4 Packing

[0282] The compositions may, if desired, be presented in a pack or dispenser device which may contain one or more unit dosage forms containing the active ingredient The pack may, for example, comprise metal or plastic foil, such as a blister pack The pack or dispenser device may be accompanied by instructions for administration. Compositions comprising a compound of the invention formulated in a compatible pharmaceutical carrier may also be prepared, placed in an appropriate container, and labeled for treatment of an indicated condition.

### 4.13 Antibodies

[0283] Also included in the invention are antibodies to proteins, or fragments of proteins of the invention. The term “antibody” as used herein refers to immunoglobulin molecules and immunologically active portions of immunoglobulin (Ig) molecules, i.e., molecules that contain an antigen binding site that specifically binds (immunoreacts with) an antigen. Such antibodies include, but are not limited to, polyclonal, monoclonal, chimeric, single chain, F_{ab}, F_{ab′} and F_{(ab′)2} fragments, and an F_{ab} expression library. In general, an antibody molecule obtained from humans relates to any of the classes IgG, IgM, IgA, IgE and IgD, which differ from one another by the nature of the heavy chain present in the molecule. Certain classes have subclasses as well, such as IgG₁, IgG₂, and others. Furthermore, in humans, the light chain may be a kappa chain or a lambda chain. Reference herein to antibodies includes a reference to all such classes, subclasses and types of human antibody species.

[0284] An isolated related protein of the invention may be intended to serve as an antigen, or a portion or fragment thereof, and additionally can be used as an immunogen to generate antibodies that immunospecifically bind the antigen, using standard techniques for polyclonal and monoclonal antibody preparation. The full-length protein can be used or, alternatively, the invention provides antigenic peptide fragments of the antigen for use as immunogens. An antigenic peptide fragment comprises at least 6 amino acid residues of the amino acid sequence of the full length protein, such as the amino acid sequences shown in SEQ ID NO: 147-292, or 439-584, and encompasses an epitope thereof such that an antibody raised against the peptide forms a specific immune complex with the full length protein or with any fragment that contains the epitope. Preferably, the antigenic peptide comprises at least 10 amino acid residues, or at least 15 amino acid residues, or at least 20 amino acid residues, or at least 30 amino acid residues. Preferred epitopes encompassed by the antigenic peptide are regions of the protein that are located on its surface; commonly these are hydrophilic regions.

[0285] In certain embodiments of the invention, at least one epitope encompassed by the antigenic peptide is a region of -related protein that is located on the surface of the protein, e.g., a hydrophilic region. A hydrophobicity analysis of the human related protein sequence will indicate which regions of a related protein are particularly hydrophilic and, therefore, are likely to encode surface residues useful for targeting antibody production. As a means for targeting antibody production, hydropathy plots showing regions of hydrophilicity and hydrophobicity may be generated by any method well known in the art, including, for example, the Kyte Doolittle or the Hopp Woods methods, either with or without Fourier transformation. See, e.g., Hopp and Woods, 1981, Proc. Nat. Acad. Sci. USA 78: 3824-3828; Kyte and Doolittle 1982, J. Mol. Biol. 157: 105-142, each of which is incorporated herein by reference in its entirety. Antibodies that are specific for one or more domains within an antigenic protein, or derivatives, fragments, analogs or homologs thereof, are also provided herein.

[0286] A protein of the invention, or a derivative, fragment, analog, homolog or ortholog thereof, may be utilized as an immunogen in the generation of antibodies that immunospecifically bind these protein components.

[0287] Various procedures known within the art may be used for the production of polyclonal or monoclonal antibodies directed against a protein of the invention, or against derivatives, fragments, analogs homologs or orthologs thereof (see, for example, Antibodies: A Laboratory Manual, Harlow E, and Lane D, 1988, Cold Spring Harbor Laboratory Press, Cold Spring Harbor, N.Y., incorporated herein by reference). Some of these antibodies are discussed below.

### 4.13.1 Polyclonal Antibodies

[0288] For the production of polyclonal antibodies, various suitable host animals (e.g., rabbit, goat, mouse or other mammal) may be immunized by one or more injections with the native protein, a synthetic variant thereof, or a derivative of the foregoing. An appropriate immunogenic preparation can contain, for example, the naturally occurring immunogenic protein, a chemically synthesized polypeptide representing the immunogenic protein, or a recombinantly expressed immunogenic protein. Furthermore, the protein may be conjugated to a second protein known to be immunogenic in the mammal being immunized. Examples of such immunogenic proteins include but are not limited to keyhole limpet hemocyanin, serum albumin, bovine thyroglobulin, and soybean trypsin inhibitor. The preparation can further include an adjuvant. Various adjuvants used to increase the immunological response include, but are not limited to, Freund's (complete and incomplete), mineral gels (e.g., aluminum hydroxide), surface active substances (e.g., lysolecithin, pluronic polyols; polyanions, peptides, oil emulsions, dinitrophenol, etc.), adjuvants usable in humans such as Bacille Calmette-Guerin and Corynebacterium parvum, or similar immunostimulatory agents. Additional examples of adjuvants which can be employed include MPL-TDM adjuvant (monophosphoryl Lipid A, synthetic trehalose dicorynomycolate).

[0289] The polyclonal antibody molecules directed against the immunogenic protein can be isolated from the mammal (e.g., from the blood) and further purified by well known techniques, such as affinity chromatography using protein A or protein G, which provide primarily the IgG fraction of immune serum. Subsequently, or alternatively, the specific antigen which is the target of the immunoglobulin sought, or an epitope thereof, may be immobilized on a column to purify the immune specific antibody by immunoaffinity chromatography. Purification of immunoglobulins is discussed, for example, by D. Wilkinson (The Scientist, published by The Scientist, Inc., Philadelphia Pa., Vol. 14, No. 8 (Apr. 17, 2000), pp. 25-28).

### 4.13.2 Monoclonal Antibodies

[0290] The term “monoclonal antibody” (MAb) or “monoclonal antibody composition”, as used herein, refers to a population of antibody molecules that contain only one molecular species of antibody molecule consisting of a unique light chain gene product and a unique heavy chain gene product. In particular, the complementarity determining regions (CDRs) of the monoclonal antibody are identical in all the molecules of the population. MAbs thus contain an antigen binding site capable of immunoreacting with a particular epitope of the antigen characterized by a unique binding affinity for it.

[0291] Monoclonal antibodies can be prepared using hybridoma methods, such as those described by Kohler and Milstein, Nature, 256:495 (1975). In a hybridoma method, a mouse, hamster, or other appropriate host animal, is typically immunized with an immunizing agent to elicit lymphocytes that produce or are capable of producing antibodies that will specifically bind to the immunizing agent. Alternatively, the lymphocytes can be immunized in vitro. The immunizing agent will typically include the protein antigen, a fragment thereof or a fusion protein thereof. Generally, either peripheral blood lymphocytes are used if cells of human origin are desired, or spleen cells or lymph node cells are used if non-human mammalian sources are desired. The lymphocytes are then fused with an immortalized cell line using a suitable fusing agent, such as polyethylene glycol, to form a hybridoma cell (Goding, Monoclonal Antibodies: Principles and Practice, Academic Press, (1986) pp. 59-103). Immortalized cell lines are usually transformed mammalian cells, particularly myeloma cells of rodent, bovine and human origin. Usually, rat or mouse myeloma cell lines are employed. The hybridoma cells can be cultured in a suitable culture medium that preferably contains one or more substances that inhibit the growth or survival of the unfused, immortalized cells. For example, if the parental cells lack the enzyme hypoxanthine guanine phosphoribosyl transferase (HGPRT or HPRT), the culture medium for the hybridomas typically will include hypoxanthine, aminopterin, and thymidine (“HAT medium”), which substances prevent the growth of HGPRT-deficient cells.

[0292] Preferred immortalized cell lines are those that fuse efficiently, support stable high level expression of antibody by the selected antibody-producing cells, and are sensitive to a medium such as HAT medium. More preferred immortalized cell lines are murine myeloma lines, which can be obtained, for instance, from the Salk Institute Cell Distribution Center, San Diego, Calif. and the American Type Culture Collection, Manassas, Va. Human myeloma and mouse-human heteromyeloma cell lines also have been described for the production of human monoclonal antibodies (Kozbor, J. Immunol., 133:3001 (1984); Brodeur et al., Monoclonal Antibody Production Techniques and Applications, Marcel Dekker, Inc., New York, (1987) pp. 51-63).

[0293] The culture medium in which the hybridoma cells are cultured can then be assayed for the presence of monoclonal antibodies directed against the antigen. Preferably, the binding specificity of monoclonal antibodies produced by the hybridoma cells is determined by immunoprecipitation or by an in vitro binding assay, such as radioimmunoassay (RIA) or enzyme-linked immunoabsorbent assay (ELISA). Such techniques and assays are known in the art. The binding affinity of the monoclonal antibody can, for example, be determined by the Scatchard analysis of Munson and Pollard, Anal. Biochem., 107:220 (1980). Preferably, antibodies having a high degree of specificity and a high binding affinity for the target antigen are isolated.

[0294] After the desired hybridoma cells are identified, the clones can be subcloned by limiting dilution procedures and grown by standard methods. Suitable culture media for this purpose include, for example, Dulbecco's Modified Eagle's Medium and RPMI-1640 medium. Alternatively, the hybridoma cells can be grown in vivo as ascites in a mammal. The monoclonal antibodies secreted by the subclones can be isolated or purified from the culture medium or ascites fluid by conventional immunoglobulin purification procedures such as, for example, protein A-Sepharose, hydroxylapatite chromatography, gel electrophoresis, dialysis, or affinity chromatography.

[0295] The monoclonal antibodies can also be made by recombinant DNA methods, such as those described in U.S. Pat. No. 4,816,567. DNA encoding the monoclonal antibodies of the invention can be readily isolated and sequenced using conventional procedures (e.g., by using oligonucleotide probes that are capable of binding specifically to genes encoding the heavy and light chains of murine antibodies). The hybridoma cells of the invention serve as a preferred source of such DNA. Once isolated, the DNA can be placed into expression vectors, which are then transfected into host cells such as simian COS cells, Chinese hamster ovary (CHO) cells, or myeloma cells that do not otherwise produce immunoglobulin protein, to obtain the synthesis of monoclonal antibodies in the recombinant host cells. The DNA also can be modified, for example, by substituting the coding sequence for human heavy and light chain constant domains in place of the homologous murine sequences (U.S. Pat. No. 4,816,567; Morrison, Nature 368, 812-13 (1994)) or by covalently joining to the immunoglobulin coding sequence all or part of the coding sequence for a non-immunoglobulin polypeptide. Such a non-immunoglobulin polypeptide can be substituted for the constant domains of an antibody of the invention, or can be substituted for the variable domains of one antigen-combining site of an antibody of the invention to create a chimeric bivalent antibody.

### 4.13.3 Humanized Antibodies

[0296] The antibodies directed against the protein antigens of the invention can further comprise humanized antibodies or human antibodies. These antibodies are suitable for administration to humans without engendering an immune response by the human against the administered immunoglobulin. Humanized forms of antibodies are chimeric immunoglobulins, immunoglobulin chains or fragments thereof (such as Fv, Fab, Fab′, F(ab′)₂ or other antigen-binding subsequences of antibodies) that are principally comprised of the sequence of a human immunoglobulin, and contain minimal sequence derived from a non-human immunoglobulin. Humanization can be performed following the method of Winter and co-workers (Jones et al., Nature, 321:522-525 (1986); Riechmann et al., Nature, 332:323-327 (1988); Verhoeyen et al., Science, 239:1534-1536 (1988)), by substituting rodent CDRs or CDR sequences for the corresponding sequences of a human antibody. (See also U.S. Pat. No. 5,225,539.) In some instances, Fv framework residues of the human immunoglobulin are replaced by corresponding non-human residues. Humanized antibodies can also comprise residues which are found neither in the recipient antibody nor in the imported CDR or framework sequences. In general, the humanized antibody will comprise substantially all of at least one, and typically two, variable domains, in which all or substantially all of the CDR regions correspond to those of a non-human immunoglobulin and all or substantially all of the framework regions are those of a human immunoglobulin consensus sequence. The humanized antibody optimally also will comprise at least a portion of an immunoglobulin constant region (Fc), typically that of a human immunoglobulin (Jones et al., 1986; Riechmann et al., 1988; and Presta, Curr. Op. Struct. Biol., 2:593-596 (1992)).

### 4.13.4 Human Antibodies

[0297] Fully human antibodies relate to antibody molecules in which essentially the entire sequences of both the light chain and the heavy chain, including the CDRs, arise from human genes. Such antibodies are termed “human antibodies”, or “fully human antibodies” herein. Human monoclonal antibodies can be prepared by the trioma technique; the human B-cell hybridoma technique (see Kozbor, et al., 1983 Immunol Today 4: 72) and the EBV hybridoma technique to produce human monoclonal antibodies (see Cole, et al., 1985 In: MONOCLONAL ANTIBODIES AND CANCER THERAPY, Alan R. Liss, Inc., pp. 77-96). Human monoclonal antibodies may be utilized in the practice of the present invention and may be produced by using human hybridomas (see Cote, et al., 1983. Proc Natl Acad Sci USA 80: 2026-2030) or by transforming human B-cells with Epstein Barr Virus in vitro (see Cole, et al., 1985 In: MONOCLONAL ANTIBODIES AND CANCER THERAPY, Alan R. Liss, Inc., pp. 77-96).

[0298] In addition, human antibodies can also be produced using additional techniques, including phage display libraries (Hoogenboom and Winter, J. Mol. Biol. 227:381 (1991); Marks et al., J. Mol. Biol., 222:581 (1991)). Similarly, human antibodies can be made by introducing human immunoglobulin loci into transgenic animals, e.g., mice in which the endogenous immunoglobulin genes have been partially or completely inactivated. Upon challenge, human antibody production is observed, which closely resembles that seen in humans in all respects, including gene rearrangement, assembly, and antibody repertoire. This approach is described, for example, in U.S. Pat. Nos. 5,545,807; 5,545,806; 5,569,825; 5,625,126; 5,633,425; 5,661,016, and in Marks et al. (Bio/Technology 10, 779-783 (1992)); Lonberg et al. (Nature 368 856-859 (1994)); Morrison (Nature 368 812-13 (1994)); Fishwild et al, (Nature Biotechnology 14, 845-51 (1996)); Neuberger (Nature Biotechnology 14, 826 (1996)); and Lonberg and Huszar (Intern. Rev. Immunol. 13 65-93 (1995)).

[0299] Human antibodies may additionally be produced using transgenic nonhuman animals which are modified so as to produce fully human antibodies rather than the animal's endogenous antibodies in response to challenge by an antigen. (See PCT publication WO94/02602). The endogenous genes encoding the heavy and light immunoglobulin chains in the nonhuman host have been incapacitated, and active loci encoding human heavy and light chain immunoglobulins are inserted into the host's genome. The human genes are incorporated, for example, using yeast artificial chromosomes containing the requisite human DNA segments. An animal which provides all the desired modifications is then obtained as progeny by crossbreeding intermediate transgenic animals containing fewer than the full complement of the modifications. The preferred embodiment of such a nonhuman animal is a mouse, and is termed the Xenomouse™ as disclosed in PCT publications WO 96/33735 and WO 96/34096. This animal produces B cells which secrete fully human immunoglobulins. The antibodies can be obtained directly from the animal after immunization with an immunogen of interest, as, for example, a preparation of a polyclonal antibody, or alternatively from immortalized B cells derived from the animal, such as hybridomas producing monoclonal antibodies. Additionally, the genes encoding the immunoglobulins with human variable regions can be recovered and expressed to obtain the antibodies directly, or can be further modified to obtain analogs of antibodies such as, for example, single chain Fv molecules.

[0300] An example of a method of producing a nonhuman host, exemplified as a mouse, lacking expression of an endogenous immunoglobulin heavy chain is disclosed in U.S. Pat. No. 5,939,598. It can be obtained by a method including deleting the J segment genes from at least one endogenous heavy chain locus in an embryonic stem cell to prevent rearrangement of the locus and to prevent formation of a transcript of a rearranged immunoglobulin heavy chain locus, the deletion being effected by a targeting vector containing a gene encoding a selectable marker; and producing from the embryonic stem cell a transgenic mouse whose somatic and germ cells contain the gene encoding the selectable marker.

[0301] A method for producing an antibody of interest, such as a human antibody, is disclosed in U.S. Pat. No. 5,916,771. It includes introducing an expression vector that contains a nucleotide sequence encoding a heavy chain into one mammalian host cell in culture, introducing an expression vector containing a nucleotide sequence encoding a light chain into another mammalian host cell, and fusing the two cells to form a hybrid cell. The hybrid cell expresses an antibody containing the heavy chain and the light chain.

[0302] In a further improvement on this procedure, a method for identifying a clinically relevant epitope on an immunogen, and a correlative method for selecting an antibody that binds immunospecifically to the relevant epitope with high affinity, are disclosed in PCT publication WO 99/53049.

### 4.13.5 F_{ab} Fragments and Single Chain Antibodies

[0303] According to the invention, techniques can be adapted for the production of single-chain antibodies specific to an antigenic protein of the invention (see e.g., U.S. Pat. No. 4,946,778). In addition, methods can be adapted for the construction of F_{ab} expression libraries (see e.g., Huse, et al., 1989 Science 246: 1275-1281) to allow rapid and effective identification of monoclonal F_{ab} fragments with the desired specificity for a protein or derivatives, fragments, analogs or homologs thereof. Antibody fragments that contain the idiotypes to a protein antigen may be produced by techniques known in the art including, but not limited to: (i) an F_{(ab′)2} fragment produced by pepsin digestion of an antibody molecule; (ii) an F_{ab} fragment generated by reducing the disulfide bridges of an F_{(ab′)2} fragment; (iii) an F_{ab} fragment generated by the treatment of the antibody molecule with papain and a reducing agent and (iv) Fᵥ fragments.

### 4.13.6 Bispecific Antibodies

[0304] Bispecific antibodies are monoclonal, preferably human or humanized, antibodies that have binding specificities for at least two different antigens. In the present case, one of the binding specificities is for an antigenic protein of the invention. The second binding target is any other antigen, and advantageously is a cell-surface protein or receptor or receptor subunit.

[0305] Methods for making bispecific antibodies are known in the art. Traditionally, the recombinant production of bispecific antibodies is based on the co-expression of two immunoglobulin heavy-chain/light-chain pairs, where the two heavy chains have different specificities (Milstein and Cuello, Nature, 305:537-539 (1983)). Because of the random assortment of immunoglobulin heavy and light chains, these hybridomas (quadromas) produce a potential mixture of ten different antibody molecules, of which only one has the correct bispecific structure. The purification of the correct molecule is usually accomplished by affinity chromatography steps. Similar procedures are disclosed in WO 93/08829, published 13 May 1993, and in Traunecker et al., 1991 EMBO J., 10:3655-3659.

[0306] Antibody variable domains with the desired binding specificities (antibody-antigen combining sites) can be fused to immunoglobulin constant domain sequences. The fusion preferably is with an immunoglobulin heavy-chain constant domain, comprising at least part of the hinge, CH2, and CH3 regions. It is preferred to have the first heavy-chain constant region (CH1) containing the site necessary for light-chain binding present in at least one of the fusions. DNAs encoding the immunoglobulin heavy-chain fusions and, if desired, the immunoglobulin light chain, are inserted into separate expression vectors, and are co-transfected into a suitable host organism. For further details of generating bispecific antibodies see, for example, Suresh et al., Methods in Enzymology, 121:210 (1986).

[0307] According to another approach described in WO 96/27011, the interface between a pair of antibody molecules can be engineered to maximize the percentage of heterodimers which are recovered from recombinant cell culture. The preferred interface comprises at least a part of the CH3 region of an antibody constant domain. In this method, one or more small amino acid side chains from the interface of the first antibody molecule are replaced with larger side chains (e.g. tyrosine or tryptophan). Compensatory “cavities” of identical or similar size to the large side chain(s) are created on the interface of the second antibody molecule by replacing large amino acid side chains with smaller ones (e.g. alanine or threonine). This provides a mechanism for increasing the yield of the heterodimer over other unwanted end-products such as homodimers.

[0308] Bispecific antibodies can be prepared as fill length antibodies or antibody fragments (e.g. F(ab′)₂ bispecific antibodies). Techniques for generating bispecific antibodies from antibody fragments have been described in the literature. For example, bispecific antibodies can be prepared using chemical linkage. Brennan et al., Science 229:81 (1985) describe a procedure wherein intact antibodies are proteolytically cleaved to generate F(ab′)₂ fragments. These fragments are reduced in the presence of the dithiol complexing agent sodium arsenite to stabilize vicinal dithiols and prevent intermolecular disulfide formation. The Fab′ fragments generated are then converted to thionitrobenzoate (TNB) derivatives. One of the Fab′-TNB derivatives is then reconverted to the Fab′-thiol by reduction with mercaptoethylamine and is mixed with an equimolar amount of the other Fab′-TNB derivative to form the bispecific antibody. The bispecific antibodies produced can be used as agents for the selective immobilization of enzymes.

[0309] Additionally, Fab′ fragments can be directly recovered from E. coli and chemically coupled to form bispecific antibodies. Shalaby et al., J. Exy. Med. 175:217-225 (1992) describe the production of a fully humanized bispecific antibody F(ab′)₂ molecule. Each Fab′ fragment was separately secreted from E. coli and subjected to directed chemical coupling in vitro to form the bispecific antibody. The bispecific antibody thus formed was able to bind to cells overexpressing the ErbB2 receptor and normal human T cells, as well as trigger the lytic activity of human cytotoxic lymphocytes against human breast tumor targets.

[0310] Various techniques for making and isolating bispecific antibody fragments directly from recombinant cell culture have also been described. For example, bispecific antibodies have been produced using leucine zippers. Kostelny et al., J. Immunol. 148(5):1547-1553 (1992). The leucine zipper peptides from the Fos and Jun proteins were linked to the Fab′ portions of two different antibodies by gene fusion. The antibody homodimers were reduced at the hinge region to form monomers and then re-oxidized to form the antibody heterodimers. This method can also be utilized for the production of antibody homodimers. The “diabody” technology described by Hollinger et al., Proc. Natl. Acad. Sci. USA 90:6444-6448 (1993) has provided an alternative mechanism for making bispecific antibody fragments. The fragments comprise a heavy-chain variable domain (V_{H}) connected to a light-chain variable domain (V_{L}) by a linker which is too short to allow pairing between the two domains on the same chain. Accordingly, the V_{H} and V_{L} domains of one fragment are forced to pair with the complementary V_{L} and V_{H} domains of another fragment, thereby forming two antigen-binding sites. Another strategy for making bispecific antibody fragments by the use of single-chain Fv (sFv) dimers has also been reported. See, Gruber et al., J. Immunol. 152:5368 (1994).

[0311] Antibodies with more than two valencies are contemplated. For example, trispecific antibodies can be prepared. Tutt et al., J. Immunol. 147:60 (1991). Exemplary bispecific antibodies can bind to two different epitopes, at least one of which originates in the protein antigen of the invention. Alternatively, an anti-antigenic arm of an immunoglobulin molecule can be combined with an arm which binds to a triggering molecule on a leukocyte such as a T-cell receptor molecule (e.g. CD2, CD3, CD28, or B7), or Fc receptors for IgG (FcγR), such as FcγRI (CD64), FcγRII (CD32) and FcγRRII (CD16) so as to focus cellular defense mechanisms to the cell expressing the particular antigen. Bispecific antibodies can also be used to direct cytotoxic agents to cells which express a particular antigen. These antibodies possess an antigen-binding arm and an arm which binds a cytotoxic agent or a radionuclide chelator, such as EOTUBE, DPTA, DOTA, or TFTA. Another bispecific antibody of interest binds the protein antigen described herein and further binds tissue factor (TF).

### 4.13.7 Heteroconjugate Antibodies

[0312] Heteroconjugate antibodies are also within the scope of the present invention. Heteroconjugate antibodies are composed of two covalently joined antibodies. Such antibodies have, for example, been proposed to target immune system cells to unwanted cells (U.S. Pat. No. 4,676,980), and for treatment of HIV infection (WO 91/00360; WO 92/200373; EP 03089). It is contemplated that the antibodies can be prepared in vitro using known methods in synthetic protein chemistry, including those involving crosslinking agents. For example, immunotoxins can be constructed using a disulfide exchange reaction or by forming a thioether bond. Examples of suitable reagents for this purpose include iminothiolate and methyl-4-mercaptobutyrimidate and those disclosed, for example, in U.S. Pat. No. 4,676,980.

### 4.13.8 Effector Function Engineering

[0313] It can be desirable to modify the antibody of the invention with respect to effector function, so as to enhance, e.g., the effectiveness of the antibody in treating cancer. For example, cysteine residue(s) can be introduced into the Fc region, thereby allowing interchain disulfide bond formation in this region. The homodimeric antibody thus generated can have improved internalization capability and/or increased complement-mediated cell killing and antibody-dependent cellular cytotoxicity (ADCC). See Caron et al., J. Exp Med., 176: 1191-1195 (1992) and Shopes, J. Immunol., 148: 2918-2922 (1992). Homodimeric antibodies with enhanced anti-tumor activity can also be prepared using heterobifinctional cross-linkers as described in Wolff et al. Cancer Research, 53: 2560-2565 (1993). Alternatively, an antibody can be engineered that has dual Fc regions and can thereby have enhanced complement lysis and ADCC capabilities. See Stevenson et al., Anti-Cancer Drug Design, 3: 219-230 (1989).

### 4.13.9 Immunoconjugates

[0314] The invention also pertains to immunoconjugates comprising an antibody conjugated to a cytotoxic agent such as a chemotherapeutic agent, toxin (e.g., an enzymatically active toxin of bacterial, fungal, plant, or animal origin, or fragments thereof), or a radioactive isotope (i.e., a radioconjugate).

[0315] Chemotherapeutic agents useful in the generation of such immunoconjugates have been described above. Enzymatically active toxins and fragments thereof that can be used include diphtheria A chain, nonbinding active fragments of diphtheria toxin, exotoxin A chain (from Pseudomonas aeruginosa), ricin A chain, abrin A chain, modeccin A chain, alpha-sarcin, Aleurites fordii proteins, dianthin proteins, Phytolaca americana proteins (PAPI, PAPII, and PAP-S), momordica charantia inhibitor, curcin, crotin, sapaonaria officinalis inhibitor, gelonin, mitogellin, restrictocin, phenomycin, enomycin, and the tricothecenes. A variety of radionuclides are available for the production of radioconjugated antibodies. Examples include ²¹²Bi, ¹³¹I, ¹³¹In, ⁹⁰Y, and ¹⁸⁶Re.

[0316] Conjugates of the antibody and cytotoxic agent are made using a variety of bifunctional protein-coupling agents such as N-succinimidyl-3-(2-pyridyldithiol) propionate (SPDP), iminothiolane (IT), bifunctional derivatives of imidoesters (such as dimethyl adipimidate HCL), active esters (such as disuccinimidyl suberate), aldehydes (such as glutareldehyde), bis-azido compounds (such as bis (p-azidobenzoyl) hexanediamine), bis-diazonium derivatives (such as bis-(p-diazoniumbenzoyl)-ethylenediamine), diisocyanates (such as tolyene 2,6-diisocyanate), and bis-active fluorine compounds (such as 1,5 difluoro-2,4-dinitrobenzene). For example, a ricin immunotoxin can be prepared as described in Vitetta et al., Science, 238: 1098 (1987). Carbon-14-labeled 1-isothiocyanatobenzyl-3-methyldiethylene triaminepentaacetic acid (MX-DTPA) is an exemplary chelating agent for conjugation of radionucleotide to the antibody. See WO094/11026.

[0317] In another embodiment, the antibody can be conjugated to a “receptor” (such as streptavidin) for utilization in tumor pretargeting wherein the antibody-receptor conjugate is administered to the patient, followed by removal of unbound conjugate from the circulation using a clearing agent and then administration of a “ligand” (e.g., avidin) that is in turn conjugated to a cytotoxic agent.

### 4.14 Computer Readable Sequences

[0318] In one application of this embodiment, a nucleotide sequence of the present invention can be recorded on computer readable media. As used herein, “computer readable media” refers to any medium which can be read and accessed directly by a computer. Such media include, but are not limited to: magnetic storage media, such as floppy discs, hard disc storage medium, and magnetic tape; optical storage media such as CD-ROM; electrical storage media such as RAM and ROM; and hybrids of these categories such as magnetic/optical storage media. A skilled artisan can readily appreciate how any of the presently known computer readable mediums can be used to create a manufacture comprising computer readable medium having recorded thereon a nucleotide sequence of the present invention. As used herein, “recorded” refers to a process for storing information on computer readable medium. A skilled artisan can readily adopt any of the presently known methods for recording information on computer readable medium to generate manufactures comprising the nucleotide sequence information of the present invention.

[0319] A variety of data storage structures are available to a skilled artisan for creating a computer readable medium having recorded thereon a nucleotide sequence of the present invention. The choice of the data storage structure will generally be based on the means chosen to access the stored information. In addition, a variety of data processor programs and formats can be used to store the nucleotide sequence information of the present invention on computer readable medium. The sequence information can be represented in a word processing text file, formatted in commercially-available software such as WordPerfect and Microsoft Word, or represented in the form of an ASCII file, stored in a database application, such as DB2, Sybase, Oracle, or the like. A skilled artisan can readily adapt any number of data processor structuring formats (e.g. text file or database) in order to obtain computer readable medium having recorded thereon the nucleotide sequence information of the present invention.

[0320] By providing any of the nucleotide sequences SEQ ID NO: 1-146, or 293-438 or a representative fragment thereof; or a nucleotide sequence at least 95% identical to any of the nucleotide sequences of SEQ ID NO: 1-146, or 293-438 in computer readable form, a skilled artisan can routinely access the sequence information for a variety of purposes. Computer software is publicly available which allows a skilled artisan to access sequence information provided in a computer readable medium. The examples which follow demonstrate how software which implements the BLAST (Altschul et al., J. Mol. Biol. 215:403-410 (1990)) and BLAZE (Brutlag et al., Comp. Chem. 17:203-207 (1993)) search algorithms on a Sybase system is used to identify open reading frames (ORFs) within a nucleic acid sequence. Such ORFs may be protein encoding fragments and may be useful in producing commercially important proteins such as enzymes used in fermentation reactions and in the production of commercially useful metabolites.

[0321] As used herein, “a computer-based system” refers to the hardware means, software means, and data storage means used to analyze the nucleotide sequence information of the present invention. The minimum hardware means of the computer-based systems of the present invention comprises a central processing unit (CPU), input means, output means, and data storage means. A skilled artisan can readily appreciate that any one of the currently available computer-based systems are suitable for use in the present invention. As stated above, the computer-based systems of the present invention comprise a data storage means having stored therein a nucleotide sequence of the present invention and the necessary hardware means and software means for supporting and implementing a search means. As used herein, “data storage means” refers to memory which can store nucleotide sequence information of the present invention, or a memory access means which can access manufactures having recorded thereon the nucleotide sequence information of the present invention.

[0322] As used herein, “search means” refers to one or more programs which are implemented on the computer-based system to compare a target sequence or target structural motif with the sequence information stored within the data storage means. Search means are used to identify fragments or regions of a known sequence which match a particular target sequence or target motif. A variety of known algorithms are disclosed publicly and a variety of commercially available software for conducting search means are and can be used in the computer-based systems of the present invention. Examples of such software includes, but is not limited to, Smith-Waterman, MacPattern (EMBL), BLASTN and BLASTA (NPOLYPEPTIDEIA). A skilled artisan can readily recognize that any one of the available algorithms or implementing software packages for conducting homology searches can be adapted for use in the present computer-based systems. As used herein, a “target sequence” can be any nucleic acid or amino acid sequence of six or more nucleotides or two or more amino acids. A skilled artisan can readily recognize that the longer a target sequence is, the less likely a target sequence will be present as a random occurrence in the database. The most preferred sequence length of a target sequence is from about 10 to 300 amino acids, more preferably from about 30 to 100 nucleotide residues. However, it is well recognized that searches for commercially important fragments, such as sequence fragments involved in gene expression and protein processing, may be of shorter length.

[0323] As used herein, “a target structural motif,” or “target motif,” refers to any rationally selected sequence or combination of sequences in which the sequence(s) are chosen based on a three-dimensional configuration which is formed upon the folding of the target motif. There are a variety of target motifs known in the art. Protein target motifs include, but are not limited to, enzyme active sites and signal sequences. Nucleic acid target motifs include, but are not limited to, promoter sequences, hairpin structures and inducible expression elements (protein binding sequences).

### 4.15 Triple Helix Formation

[0324] In addition, the fragments of the present invention, as broadly described, can be used to control gene expression through triple helix formation or antisense DNA or RNA, both of which methods are based on the binding of a polynucleotide sequence to DNA or RNA. Polynucleotides suitable for use in these methods are preferably 20 to 40 bases in length and are designed to be complementary to a region of the gene involved in transcription (triple helix—see Lee et al., Nucl. Acids Res. 6:3073 (1979); Cooney et al., Science 15241:456 (1988); and Dervan et al., Science 251:1360 (1991)) or to the mRNA itself (antisense—Olmno, J. Neurochem. 56:560 (1991); Oligodeoxynucleotides as Antisense Inhibitors of Gene Expression, CRC Press, Boca Raton, Fla. (1988)). Triple helix-formation optimally results in a shut-off of RNA transcription from DNA, while antisense RNA hybridization blocks translation of an mRNA molecule into polypeptide. Both techniques have been demonstrated to be effective in model systems. Information contained in the sequences of the present invention is necessary for the design of an antisense or triple helix oligonucleotide.

### 4.16 Diagnostic Assays and Kits

[0325] The present invention further provides methods to identify the presence or expression of one of the ORFs of the present invention, or homolog thereof, in a test sample, using a nucleic acid probe or antibodies of the present invention, optionally conjugated or otherwise associated with a suitable label.

[0326] In general, methods for detecting a polynucleotide of the invention can comprise contacting a sample with a compound that binds to and forms a complex with the polynucleotide for a period sufficient to form the complex, and detecting the complex, so that if a complex is detected, a polynucleotide of the invention is detected in the sample. Such methods can also comprise contacting a sample under stringent hybridization conditions with nucleic acid primers that anneal to a polynucleotide of the invention under such conditions, and amplifying annealed polynucleotides, so that if a polynucleotide is amplified, a polynucleotide of the invention is detected in the sample.

[0327] In general, methods for detecting a polypeptide of the invention can comprise contacting a sample with a compound that binds to and forms a complex with the polypeptide for a period sufficient to form the complex, and detecting the complex, so that if a complex is detected, a polypeptide of the invention is detected in the sample.

[0328] In detail, such methods comprise incubating a test sample with one or more of the antibodies or one or more of the nucleic acid probes of the present invention and assaying for binding of the nucleic acid probes or antibodies to components within the test sample.

[0329] Conditions for incubating a nucleic acid probe or antibody with a test sample vary. Incubation conditions depend on the format employed in the assay, the detection methods employed, and the type and nature of the nucleic acid probe or antibody used in the assay. One skilled in the art will recognize that any one of the commonly available hybridization, amplification or immunological assay formats can readily be adapted to employ the nucleic acid probes or antibodies of the present invention. Examples of such assays can be found in Chard, T., An Introduction to Radioimmunoassay and Related Techniques, Elsevier Science Publishers, Amsterdam, The Netherlands (1986); Bullock, G. R. et al., Techniques in Immunocytochemistry, Academic Press, Orlando, Fla. Vol. 1 (1982), Vol. 2 (1983), Vol. 3 (1985); Tijssen, P., Practice and Theory of immunoassays: Laboratory Techniques in Biochemistry and Molecular Biology, Elsevier Science Publishers, Amsterdam, The Netherlands (1985). The test samples of the present invention include cells, protein or membrane extracts of cells, or biological fluids such as sputum, blood, serum, plasma, or urine. The test sample used in the above-described method will vary based on the assay format, nature of the detection method and the tissues, cells or extracts used as the sample to be assayed. Methods for preparing protein extracts or membrane extracts of cells are well known in the art and can be readily be adapted in order to obtain a sample which is compatible with the system utilized.

[0330] In another embodiment of the present invention, kits are provided which contain the necessary reagents to carry out the assays of the present invention. Specifically, the invention provides a compartment kit to receive, in close confinement, one or more containers which comprises: (a) a first container comprising one of the probes or antibodies of the present invention; and (b) one or more other containers comprising one or more of the following: wash reagents, reagents capable of detecting presence of a bound probe or antibody.

[0331] In detail, a compartment kit includes any kit in which reagents are contained in separate containers. Such containers include small glass containers, plastic containers or strips of plastic or paper. Such containers allows one to efficiently transfer reagents from one compartment to another compartment such that the samples and reagents are not cross-contaminated, and the agents or solutions of each container can be added in a quantitative fashion from one compartment to another. Such containers will include a container which will accept the test sample, a container which contains the antibodies used in the assay, containers which contain wash reagents (such as phosphate buffered saline, Tris-buffers, etc.), and containers which contain the reagents used to detect the bound antibody or probe. Types of detection reagents include labeled nucleic acid probes, labeled secondary antibodies, or in the alternative, if the primary antibody is labeled, the enzymatic, or antibody binding reagents which are capable of reacting with the labeled antibody. One skilled in the art will readily recognize that the disclosed probes and antibodies of the present invention can be readily incorporated into one of the established kit formats which are well known in the art.

### 4.17 Medical Imaging

[0332] The novel polypeptides and binding partners of the invention are useful in medical imaging of sites expressing the molecules of the invention (e.g., where the polypeptide of the invention is involved in the immune response, for imaging sites of inflammation or infection). See, e.g., Kunkel et al., U.S. Pat. No. 5,413,778. Such methods involve chemical attachment of a labeling or imaging agent, administration of the labeled polypeptide to a subject in a pharmaceutically acceptable carrier, and imaging the labeled polypeptide in vivo at the target site.

### 4.18 Screening Assays

[0333] Using the isolated proteins and polynucleotides of the invention, the present invention further provides methods of obtaining and identifying agents which bind to a polypeptide encoded by an ORF corresponding to any of the nucleotide sequences set forth in SEQ ID NO: 1-146, or 293-438, or bind to a specific domain of the polypeptide encoded by the nucleic acid. In detail, said method comprises the steps of:

[0334] (a) contacting an agent with an isolated protein encoded by an ORF of the present invention, or nucleic acid of the invention; and

[0335] (b) determining whether the agent binds to said protein or said nucleic acid.

[0336] In general, therefore, such methods for identifying compounds that bind to a polynucleotide of the invention can comprise contacting a compound with a polynucleotide of the invention for a time sufficient to form a polynucleotide/compound complex, and detecting the complex, so that if a polynucleotide/compound complex is detected, a compound that binds to a polynucleotide of the invention is identified.

[0337] Likewise, in general, therefore, such methods for identifying compounds that bind to a polypeptide of the invention can comprise contacting a compound with a polypeptide of the invention for a time sufficient to form a polypeptide/compound complex, and detecting the complex, so that if a polypeptide/compound complex is detected, a compound that binds to a polynucleotide of the invention is identified.

[0338] Methods for identifying compounds that bind to a polypeptide of the invention can also comprise contacting a compound with a polypeptide of the invention in a cell for a time sufficient to form a polypeptide/compound complex, wherein the complex drives expression of a receptor gene sequence in the cell, and detecting the complex by detecting reporter gene sequence expression, so that if a polypeptide/compound complex is detected, a compound that binds a polypeptide of the invention is identified.

[0339] Compounds identified via such methods can include compounds which modulate the activity of a polypeptide of the invention (that is, increase or decrease its activity, relative to activity observed in the absence of the compound). Alternatively, compounds identified via such methods can include compounds which modulate the expression of a polynucleotide of the invention (that is, increase or decrease expression relative to expression levels observed in the absence of the compound). Compounds, such as compounds identified via the methods of the invention, can be tested using standard assays well known to those of skill in the art for their ability to modulate activity/expression.

[0340] The agents screened in the above assay can be, but are not limited to, peptides, carbohydrates, vitamin derivatives, or other pharmaceutical agents. The agents can be selected and screened at random or rationally selected or designed using protein modeling techniques.

[0341] For random screening, agents such as peptides, carbohydrates, pharmaceutical agents and the like are selected at random and are assayed for their ability to bind to the protein encoded by the ORF of the present invention. Alternatively, agents may be rationally selected or designed. As used herein, an agent is said to be “rationally selected or designed” when the agent is chosen based on the configuration of the particular protein. For example, one skilled in the art can readily adapt currently available procedures to generate peptides, pharmaceutical agents and the like, capable of binding to a specific peptide sequence, in order to generate rationally designed antipeptide peptides, for example see Hurby et al., Application of Synthetic Peptides: Antisense Peptides,” In Synthetic Peptides, A User's Guide, W. H. Freeman, New York (1992), pp. 289-307, and Kaspczak et al., Biochemistry 28:9230-8 (1989), or pharmaceutical agents, or the like.

[0342] In addition to the foregoing, one class of agents of the present invention, as broadly described, can be used to control gene expression through binding to one of the ORFs or EMFs of the present invention. As described above, such agents can be randomly screened or rationally designed/selected. Targeting the ORF or EMF allows a skilled artisan to design sequence specific or element specific agents, modulating the expression of either a single ORF or multiple ORFs which rely on the same EMF for expression control. One class of DNA binding agents are agents which contain base residues which hybridize or form a triple helix formation by binding to DNA or RNA. Such agents can be based on the classic phosphodiester, ribonucleic acid backbone, or can be a variety of sulfhydryl or polymeric derivatives which have base attachment capacity.

[0343] Agents suitable for use in these methods preferably contain 20 to 40 bases and are designed to be complementary to a region of the gene involved in transcription (triple helix—see Lee et al., Nucl. Acids Res. 6:3073 (1979); Cooney et al., Science 241:456 (1988); and Dervan et al., Science 251:1360 (1991)) or to the mRNA itself (antisense—Okano, J. Neurochem. 56:560 (1991); Oligodeoxynucleotides as Antisense Inhibitors of Gene Expression, CRC Press, Boca Raton, Fla. (1988)). Triple helix-formation optimally results in a shut-off of RNA transcription from DNA, while antisense RNA hybridization blocks translation of an mRNA molecule into polypeptide. Both techniques have been demonstrated to be effective in model systems. Information contained in the sequences of the present invention is necessary for the design of an antisense or triple helix oligonucleotide and other DNA binding agents.

[0344] Agents which bind to a protein encoded by one of the ORFs of the present invention can be used as a diagnostic agent. Agents which bind to a protein encoded by one of the ORFs of the present invention can be formulated using known techniques to generate a pharmaceutical composition.

### 4.19 Use of Nucleic Acids as Probes

[0345] Another aspect of the subject invention is to provide for polypeptide-specific nucleic acid hybridization probes capable of hybridizing with naturally occurring nucleotide sequences. The hybridization probes of the subject invention may be derived from any of the nucleotide sequences SEQ ID NO: 1-146, or 293-438. Because the corresponding gene is only expressed in a limited number of tissues, a hybridization probe derived from any of the nucleotide sequences SEQ ID NO: 1-146, or 293-438 can be used as an indicator of the presence of RNA of cell type of such a tissue in a sample.

[0346] Any suitable hybridization technique can be employed, such as, for example, in situ hybridization. PCR as described in U.S. Pat. Nos. 4,683,195 and 4,965,188 provides additional uses for oligonucleotides based upon the nucleotide sequences. Such probes used in PCR may be of recombinant origin, may be chemically synthesized, or a mixture of both. The probe will comprise a discrete nucleotide sequence for the detection of identical sequences or a degenerate pool of possible sequences for identification of closely related genomic sequences.

[0347] Other means for producing specific hybridization probes for nucleic acids include the cloning of nucleic acid sequences into vectors for the production of mRNA probes. Such vectors are known in the art and are commercially available and may be used to synthesize RNA probes in vitro by means of the addition of the appropriate RNA polymerase as T7 or SP6 RNA polymerase and the appropriate radioactively labeled nucleotides. The nucleotide sequences may be used to construct hybridization probes for mapping their respective genomic sequences. The nucleotide sequence provided herein may be mapped to a chromosome or specific regions of a chromosome using well known genetic and/or chromosomal mapping techniques. These techniques include in situ hybridization, linkage analysis against known chromosomal markers, hybridization screening with libraries or flow-sorted chromosomal preparations specific to known chromosomes, and the like. The technique of fluorescent in situ hybridization of chromosome spreads has been described, among other places, in Verna et al (1988) Human Chromosomes: A Manual of Basic Techniques, Pergamon Press, New York N.Y.

[0348] Fluorescent in situ hybridization of chromosomal preparations and other physical chromosome mapping techniques may be correlated with additional genetic map data. Examples of genetic map data can be found in the 1994 Genome Issue of Science (265:1981f). Correlation between the location of a nucleic acid on a physical chromosomal map and a specific disease (or predisposition to a specific disease) may help delimit the region of DNA associated with that genetic disease. The nucleotide sequences of the subject invention may be used to detect differences in gene sequences between normal, carrier or affected individuals.

### 4.20 Preparation of Support Bound Oligonucleotides

[0349] Oligonucleotides, i.e., small nucleic acid segments, may be readily prepared by, for example, directly synthesizing the oligonucleotide by chemical means, as is commonly practiced using an automated oligonucleotide synthesizer.

[0350] Support bound oligonucleotides may be prepared by any of the methods known to those of skill in the art using any suitable support such as glass, polystyrene or Teflon. One strategy is to precisely spot oligonucleotides synthesized by standard synthesizers. Immobilization can be achieved using passive adsorption (Inouye & Hondo, (1990) J. Clin. Microbiol. 28(6) 1469-72); using UV light (Nagata et al., 1985; Dahlen et al., 1987; Morrissey & Collins, (1989) Mol. Cell Probes 3(2) 189-207) or by covalent binding of base modified DNA (Keller et al., 1988; 1989); all references being specifically incorporated herein.

[0351] Another strategy that may be employed is the use of the strong biotin-streptavidin interaction as a linker. For example, Broude et al. (1994) Proc. Natl. Acad. Sci. USA 91(8) 3072-6, describe the use of biotinylated probes, although these are duplex probes, that are immobilized on streptavidin-coated magnetic beads. Streptavidin-coated beads may be purchased from Dynal, Oslo. Of course, this same linking chemistry is applicable to coating any surface with streptavidin. Biotinylated probes may be purchased from various sources, such as, e.g., Operon Technologies (Alameda, Calif.).

[0352] Nunc Laboratories (Naperville, Ill.) is also selling suitable material that could be used. Nunc Laboratories have developed a method by which DNA can be covalently bound to the microwell surface termed Covalink NH. CovaLink NH is a polystyrene surface grafted with secondary amino groups (>NH) that serve as bridge-heads for further covalent coupling. CovaLink Modules may be purchased from Nunc Laboratories. DNA molecules may be bound to-CovaLink exclusively at the 5′-end by a phosphoramidate bond, allowing immobilization of more than 1 pmol of DNA (Rasmussen et al., (1991) Anal. Biochem. 198(1) 13842).

[0353] The use of CovaLink NH strips for covalent binding of DNA molecules at the 5′-end has been described (Rasmussen et al., (1991). In this technology, a phosphoramidate bond is employed (Chu et al., (1983) Nucleic Acids Res. 11(8) 6513-29). This is beneficial as immobilization using only a single covalent bond is preferred. The phosphoramidate bond joins the DNA to the CovaLink NH secondary amino groups that are positioned at the end of spacer arms covalently grafted onto the polystyrene surface through a 2 nm long spacer arm. To link an oligonucleotide to CovaLink NH via an phosphoramidate bond, the oligonucleotide terminus must have a 5′-end phosphate group. It is, perhaps, even possible for biotin to be covalently bound to CovaLink and then streptavidin used to bind the probes.

[0354] More specifically, the linkage method includes dissolving DNA in water (7.5 ng/μl) and denaturing for 10 min. at 95° C. and cooling on ice for 10 min. Ice-cold 0.1 M 1-methylimidazole, pH 7.0 (1-MeIm₇), is then added to a final concentration of 10 mM 1-MeIm₇. The single-stranded DNA solution is then dispensed into CovaLink NH strips (75 μl/well) standing on ice.

[0355] Carbodiimide 0.2 M 1-ethyl-3-(3-dimethylaminopropyl)-carbodiimide (EDC), dissolved in 10 mM 1-MeIm₇, is made fresh and 25 μl added per well. The strips are incubated for 5 hours at 50° C. After incubation the strips are washed using, e.g., Nunc-Immuno Wash; first the wells are washed 3 times, then they are soaked with washing solution for 5 min., and finally they are washed 3 times (where in the washing solution is 0.4 N NaOH, 0.25% SDS heated to 50° C.).

[0356] It is contemplated that a further suitable method for use with the present invention is that described in PCT Patent Application WO 90/03382 (Southern & Maskos), incorporated herein by reference. This method of preparing an oligonucleotide bound to a support involves attaching a nucleoside 3′-reagent through the phosphate group by a covalent phosphodiester link to aliphatic hydroxyl groups carried by the support. The oligonucleotide is then synthesized on the supported nucleoside and protecting groups removed from the synthetic oligonucleotide chain under standard conditions that do not cleave the oligonucleotide from the support. Suitable reagents include nucleoside phosphoramidite and nucleoside hydrogen phosphorate.

[0357] An on-chip strategy for the preparation of DNA probe for the preparation of DNA probe arrays maybe employed. For example, addressable laser-activated photodeprotection may be employed in the chemical synthesis of oligonucleotides directly on a glass surface, as described by Fodor et al. (1991) Science 251(4995) 767-73, incorporated herein by reference. Probes may also be immobilized on nylon supports as described by Van Ness et al. (1991) Nucleic Acids Res. 19(12) 3345-50; or linked to Teflon using the method of Duncan & Cavalier (1988) Anal. Biochem. 169(1) 104-8; all references being specifically incorporated herein.

[0358] To link an oligonucleotide to a nylon support, as described by Van Ness et a. (1991), requires activation of the nylon surface via alkylation and selective activation of the 5′-amine of oligonucleotides with cyanuric chloride.

[0359] One particular way to prepare support bound oligonucleotides is to utilize the light-generated synthesis described by Pease et al., (1994) PNAS USA 91(11) 5022-6, incorporated herein by reference). These authors used current photolithographic techniques to generate arrays of immobilized oligonucleotide probes (DNA chips); These methods, in which light is used to direct the synthesis of oligonucleotide probes in high-density, miniaturized arrays, utilize photolabile 5′-protected N-acyl-deoxynucleosidephosphoramidites, surface linker chemistry and versatile combinatorial synthesis strategies. A matrix of 256 spatially defined oligonucleotide probes may be generated in this manner.

### 4.21 Preparation of Nucleic Acid Fragments

[0360] The nucleic acids may be obtained from any appropriate source, such as cDNAs, genomic DNA, chromosomal DNA, microdissected chromosome bands, cosmid or YAC inserts, and RNA, including mRNA without any amplification steps. For example, Sambrook et al. (1989) describes three protocols for the isolation of high molecular weight DNA from mammalian cells (p. 9.14-9.23).

[0361] DNA fragments may be prepared as clones in M13, plasmid or lambda vectors and/or prepared directly from genomic DNA or cDNA by PCR or other amplification methods. Samples may be prepared or dispensed in multiwell plates. About 100-1000 ng of DNA samples may be prepared in 2-500 ml of final volume.

[0362] The nucleic acids would then be fragmented by any of the methods known to those of skill in the art including, for example, using restriction enzymes as described at 9.24-9.28 of Sambrook et al. (1989), shearing by ultrasound and NaOH treatment.

[0363] Low pressure shearing is also appropriate, as described by Schriefer et al. (1990) Nucleic Acids Res. 18(24) 7455-6, incorporated herein by reference). In this method, DNA samples are passed through a small French pressure cell at a variety of low to intermediate pressures. A lever device allows controlled application of low to intermediate pressures to the cell. The results of these studies indicate that low-pressure shearing is a useful alternative to sonic and enzymatic DNA fragmentation methods.

[0364] One particularly suitable way for fragmenting DNA is contemplated to be that using the two base recognition endonuclease, CviJI, described by Fitzgerald et al. (1992) Nucleic Acids Res. 20(14)3753-62. These authors described an approach for the rapid fragmentation and fractionation of DNA into particular sizes that they contemplated to be suitable for shotgun cloning and sequencing.

[0365] The restriction endonuclease CviJI normally cleaves the recognition sequence PuGCPy between the G and C to leave blunt ends. Atypical reaction conditions, which alter the specificity of this enzyme (CviJI**), yield a quasi-random distribution of DNA fragments form the small molecule pUC19 (2688 base pairs). Fitzgerald et al. (1992) quantitatively evaluated the randomness of this fragmentation strategy, using a CviJI** digest of pUC19 that was size fractionated by a rapid gel filtration method and directly ligated, without end repair, to a lac Z minus M13 cloning vector. Sequence analysis of 76 clones showed that CviJI** restricts pyGCPy and PuGCPu, in addition to PuGCPy sites, and that new sequence data is accumulated at a rate consistent with random fragmentation

[0366] As reported in the literature, advantages of this approach compared to sonication and agarose gel fractionation include: smaller amounts of DNA are required (0.2-0.5 μg instead of 2-5 μg); and fewer steps are involved (no preligation, end repair, chemical extraction, or agarose gel electrophoresis and elution are needed

[0367] Irrespective of the manner in which the nucleic acid fragments are obtained or prepared, it is important to denature the DNA to give single stranded pieces available for hybridization. This is achieved by incubating the DNA solution for 2-5 minutes at 80-90° C. The solution is then cooled quickly to 2° C. to prevent renaturation of the DNA fragments before they are contacted with the chip. Phosphate groups must also be removed from genomic DNA by methods known in the art.

### 4.22 Preparation of DNA Arrays

[0368] Arrays may be prepared by spotting DNA samples on a support such as a nylon membrane. Spotting may be performed by using arrays of metal pins (the positions of which correspond to an array of wells in a microtiter plate) to repeated by transfer of about 20 nl of a DNA solution to a nylon membrane. By offset printing, a density of dots higher than the density of the wells is achieved. One to 25 dots maybe accommodated in 1 mm², depending on the type of label used. By avoiding spotting in some preselected number of rows and columns, separate subsets (subarrays) may be formed. Samples in one subarray may be the same genomic segment of DNA (or the same gene) from different individuals, or may be different, overlapped genomic clones. Each of the subarrays may represent replica spotting of the same samples. In one example, a selected gene segment may be amplified from 64 patients. For each patient, the amplified gene segment may be in one 96-well plate (all 96 wells containing the same sample). A plate for each of the 64 patients is prepared. By using a 96-pin device, all samples may be spotted on one 8×12 cm membrane. Subarrays may contain 64 samples, one from each patient. Where the 96 subarrays are identical, the dot span may be 1 mm² and there may be a 1 mm space between subarrays.

[0369] Another approach is to use membranes or plates (available from NUNC, Naperville, Ill.) which may be partitioned by physical spacers e.g. a plastic grid molded over the membrane, the grid being similar to the sort of membrane applied to the bottom of multiwell plates, or hydrophobic strips. A fixed physical spacer is not preferred for imaging by exposure to flat phosphor-storage screens or x-ray films.

[0370] The present invention is illustrated in the following examples. Upon consideration of the present disclosure, one of skill in the art will appreciate that many other embodiments and variations may be made in the scope of the present invention. Accordingly, it is intended that the broader aspects of the present invention not be limited to the disclosure of the following examples. The present invention is not to be limited in scope by the exemplified embodiments which are intended as illustrations of single aspects of the invention, and compositions and methods which are functionally equivalent are within the scope of the invention. Indeed, numerous modifications and variations in the practice of the invention are expected to occur to those skilled in the art upon consideration of the present preferred embodiments. Consequently, the only limitations which should be placed upon the scope of the invention are those which appear in the appended claims.

[0371] All references cited within the body of the instant specification are hereby incorporated by reference in their entirety.

### 5. EXAMPLES

### 5.1 Example 1

[0372] Novel Nucleic Acid Sequences Obtained from Various Libraries

[0373] A plurality of novel nucleic acids were obtained from cDNA libraries prepared from various human tissues and in some cases isolated from a genomic library derived from human chromosome using standard PCR, SBH sequence signature analysis and Sanger sequencing techniques. The inserts of the library were amplified with PCR using primers specific for the vector sequences which flank the inserts. Clones from cDNA libraries were spotted on nylon membrane filters and screened with oligonucleotide probes (e.g., 7-mers) to obtain signature sequences. The clones were clustered into groups of similar or identical sequences. Representative clones were selected for sequencing.

[0374] In some cases, the 5′ sequence of the amplified inserts was then deduced using a typical Sanger sequencing protocol. PCR products were purified and subjected to fluorescent dye terminator cycle sequencing. Single pass gel sequencing was done using a 377 Applied Biosystems (ABI) sequencer to obtain the novel nucleic acid sequences. In some cases RACE (Rapid Amplification of cDNA Ends) was performed to further extend the sequence in the 5′ direction.

### 5.2 Example 2

[0375] Assemblage of Novel Nucleic Acids

[0376] The contigs or nucleic acids of the present invention, designated as SEQ ID NO: 293-438 were assembled using an EST sequence as a seed. Then a recursive algorithm was used to extend the seed EST into an extended assemblage, by pulling additional sequences from different databases (i.e., Hyseq's database containing EST sequences, dbEST version 115, gb pri 115, and UniGene version 103, and exons from public domain genomic sequences predicated by GenScan) that belong to this assemblage. The algorithm terminated when there was no additional sequences from the above databases that would extend the assemblage. Further, inclusion of component sequences into the assemblage was based on a BLASTN hit to the extending assemblage with BLAST score greater than 300 and percent identity greater than 95%.

[0377] Table 6 sets forth the novel predicted polypeptides (including proteins) encoded by the novel polynucleotides (SEQ ID NO: 293-438) of the present invention, and their corresponding translation start and stop nucleotide locations to each of SEQ ID NO: 293-438. Table 6 also indicates the method by which the polypeptide was predicted. Method A refers to a polypeptide obtained by using a software program called FASTY (available from http://fasta.bioch.virginia.edu) which selects a polypeptide based on a comparison of the translated novel polynucleotide to known polynucleotides (W. R. Pearson, Methods in Enzymology, 183:63-98 (1990), herein incorporated by reference). Method B refers to a polypeptide obtained by using a software program called GenScan for human/vertebrate sequences (available from Stanford University, Office of Technology Licensing) that predicts the polypeptide based on a probabilistic model of gene structure/compositional properties (C. Burge and S. Karlin, J. Mol. Biol., 268:78-94 (1997), incorporated herein by reference). Method C refers to a polypeptide obtained by using a Hyseq proprietary software program that translates the novel polynucleotide and its complementary strand into six possible amino acid sequences (forward and reverse frames) and chooses the polypeptide with the longest open reading frame.

### 5.3 Example 3

[0378] Novel Nucleic Acids

[0379] Using PHRAP (Univ. of Washington) or CAP4 (Paracel), full-length gene cDNA sequences and their corresponding protein sequences were generated from the assemblage. Any frame shifts and incorrect stop codons were corrected by hand editing. During editing, the sequence was checked using FASTXY algorithm against Genbank (i.e., dbEST version 118, gb pri 118, UniGene version 118, Genpept release 118). Other computer programs which may have been used in the editing process were phredPhrap and Consed ((University of Washington) and ed-ready, ed-ext and gc-zip-2 (Hyseq, Inc.)). The full-length nucleotide sequences are shown in the Sequence Listing as SEQ ID NO: 1-90. The corresponding polypeptide sequences are SEQ ID NO: 147-236.

[0380] Table 1 shows the various tissue sources of SEQ ID NO: 1-90.

[0381] The nearest neighbor results for SEQ ID NO: 1-90 were obtained by a BLASTP (version 2.0al 19MP-WashU) search against Genpept release 122 and Geneseq release 200105 (Derwent), using BLAST algorithm. The nearest neighbor result showed the closest homologue for SEQ ID NO: 1-90 from Genpept. The translated amino acid sequences for which the nucleic acid sequence encodes are shown in the Sequence Listing. The homologs with identifiable functions for SEQ ID NO: 1-90 are shown in Table 2 below.

[0382] Using eMatrix software package (Stanford University, Stanford, Calif.) (Wu et al., J. Comp. Biol., Vol. 6 pp. 219-235 (1999) herein incorporated by reference), all the sequences were examined to determine whether they had identifiable signature regions. Table 3 shows the signature region found in the indicated polypeptide sequences, the description of the signature, the eMatrix p-value(s) and the position(s) of the signature within the polypeptide sequence.

[0383] Using the pFam software program (Sonnhammer et al., Nucleic Acids Res., Vol. 26(1) pp. 320-322 (1998) herein incorporated by reference) all the polypeptide sequences were examined for domains with homology to certain peptide domains. Table 4 shows the name of the domain found, the description, the p-value and the pFam score for the identified domain within the sequence.

[0384] The nucleotide sequence within the sequences that codes for signal peptide sequences and their cleavage sites can be determine from using Neural Network SignalP V1.1 program (from Center for Biological Sequence Analysis, The Technical University of Denmark). The process for identifying prokaryotic and eukaryotic signal peptides and their cleavage sites are also disclosed by Henrik Nielson, Jacob Engelbrecht, Soren Brunak, and Gunnar von Heijne in the publication “Identification of prokaryotic and eukaryotic signal peptides and prediction of their cleavage sites” Protein Engineering, Vol. 10, no. 1, pp. 1-6 (1997), incorporated herein by reference. A maximum S score and a mean S score, as described in the Nielson et al, as reference, was obtained for the polypeptide sequences. Table 7 shows the position of the signal peptide in each of the polypeptides and the maximum score and mean score associated with that signal peptide.

### 5.4 Example 4

[0385] Novel Nucleic Acids

[0386] Using PHRAP (Univ. of Washington) or CAP4 (Paracel), a full length gene cDNA sequence and its corresponding protein sequence were generated from the assemblage. Any frame shifts and incorrect stop codons were corrected by hand editing. During editing, the sequence was checked using FASTY and/or BLAST against Genbank (i.e. dbEST version 119, gb pri 119, UniGene version 119, Genpept release 119). Other computer programs which may have been used in the editing process were phredPhrap and Consed (University of Washington) and ed-ready, ed-ext and gc-zip-2 (Hyseq, Inc.). The full-length nucleotide, including splice variants resulting from these procedures are shown in the Sequence Listing as SEQ ID NO: 91-105. The corresponding polypeptide sequences are SEQ ID NO: 237-251.

[0387] Table 1 shows the various tissue sources of SEQ ID NO: 91-105.

[0388] The nearest neighbor results for SEQ ID NO: 91-105 were obtained by a BLASTP version 2.0al 19MP-WashU search against Genpept release 122 and Geneseq release 200105 (Derwent), using BLAST algorithm. The nearest neighbor result showed the closest homologue for SEQ ID NO: 91-105 from Genpept. The homologs with identifiable functions for SEQ ID NO: 91-105 are shown in Table 2 below.

[0389] Using eMatrix software package (Stanford University, Stanford, Calif.) (Wu et al., J. Comp. Biol., Vol. 6 pp. 219-235 (1999) herein incorporated by reference), all the sequences were examined to determine whether they had identifiable signature regions. Table 3 shows the signature region found in the indicated polypeptide sequences, the description of the signature, the eMatrix p-value(s) and the position(s) of the signature within the polypeptide sequence.

[0390] Using the pFam software program (Sonnhammer et al., Nucleic Acids Res., Vol. 26(1) pp. 320-322 (1998) herein incorporated by reference) all the polypeptide sequences were examined for domains with homology to certain peptide domains. Table 4 shows the name of the domain found, the description, the p-value and the pFam score for the identified domain within the sequence.

[0391] The nucleotide sequence within the sequences that codes for signal peptide sequences and their cleavage sites can be determine from using Neural Network SignalP V1.1 program (from Center for Biological Sequence Analysis, The Technical University of Denmark). The process for identifying prokaryotic and eukaryotic signal peptides and their cleavage sites are also disclosed by Henrik Nielson, Jacob Engelbrecht, Soren Brunak, and Gunnar von Heijne in the publication “Identification of prokaryotic and eukaryotic signal peptides and prediction of their cleavage sites” Protein Engineering, Vol. 10, no. 1, pp. 1-6 (1997), incorporated herein by reference. A maximum S score and a mean S score, as described in the Nielson et al as reference, was obtained for the polypeptide sequences. Table 7 shows the position of the signal peptide in each of the polypeptides and the maximum score and mean score associated with that signal peptide.

### 5.5 Example 5

[0392] Novel Nucleic Acids

[0393] Using PHRAP (Univ. of Washington) or CAP4 (Paracel), a full-length gene cDNA sequence and its corresponding protein sequence were generated from the assemblage. Any frame shifts and incorrect stop codons were corrected by hand editing. During editing, the sequence was checked using FASTY and/or BLAST against Genbank (i.e., dbEST version 120, gb pri 120, UniGene version 120, Genpept release 120). Other computer programs which may have been used in the editing process were phredPhrap and Consed (University of Washington) and ed-ready, ed-ext and gc-zip-2 (Hyseq, Inc.). The full-length nucleotide, including splice variants resulting from these procedures are shown in the Sequence Listing as SEQ ID NO: 106-119. The corresponding polypeptide sequences are SEQ ID NO: 252-265.

[0394] Table 1 shows the various tissue sources of SEQ ID NO: 106-119.

[0395] The homology results for SEQ ID NO: 106-119 were obtained by a BLASTP version 2.0al 19MP-WashU search against Genpept release 122 and Geneseq release 200105 (Derwent), using BLAST algorithm. The nearest neighbor result showed the homologs for SEQ ID NO: 106-119 from Genpept. The translated amino acid sequences for which the nucleic acid sequence encodes are shown in the Sequence Listing. The homologes with identifiable functions for SEQ ID NO: 106-119 are shown in Table 2 below.

[0396] Using eMatrix software package (Stanford University, Stanford, Calif.) (Wu et al., J. Comp. Biol., Vol. 6 pp. 219-235 (1999) herein incorporated by reference), all the sequences were examined to determine whether they had identifiable signature regions. Table 3 shows the signature region found in the indicated polypeptide sequences, the description of the signature, the eMatrix p-value(s) and the position(s) of the signature within the polypeptide sequence.

[0397] Using the pFam software program (Sonnhammer et al., Nucleic Acids Res., Vol. 26(1) pp. 320-322 (1998) herein incorporated by reference) all the polypeptide sequences were examined for domains with homology to certain peptide domains. Table 4 shows the name of the domain found, the description, the p-value and the pFam score for the identified domain within the sequence.

[0398] The nucleotide sequence within the sequences that codes for signal peptide sequences and their cleavage sites can be determine from using Neural Network SignalP V1.1 program (from Center for Biological Sequence Analysis, The Technical University of Denmark). The process for identifying prokaryotic and eukaryotic signal peptides and their cleavage sites are also disclosed by Henrik Nielson, Jacob Engelbrecht, Soren Brunak, and Gunnar von Heijne in the publication “Identification of prokaryotic and eukaryotic signal peptides and prediction of their cleavage sites” Protein Engineering, Vol. 10, no. 1, pp. 1-6 (1997), incorporated herein by reference. A maximum S score and a mean S score, as described in the Nielson et al as reference, was obtained for the polypeptide sequences. Table 7 shows the position of the signal peptide in each of the polypeptides and the maximum score and mean score associated with that signal peptide.

### 5.6 Example 6

[0399] Novel Nucleic Acids

[0400] Using PHRAP (Univ. of Washington) or CAP4 (Paracel), a full-length gene cDNA sequence and its corresponding protein sequence were generated from the assemblage. Any frame shifts and incorrect stop codons were corrected by hand editing. During editing, the sequence was checked using FASTY and/or BLAST against Genbank (i.e., dbEST version 121, gb pri 121, UniGene version 121, Genpept release 121). Other computer programs which may have been used in the editing process were phredPhrap and Consed (University of Washington) and ed-ready, ed-ext and gc-zip-2 (Hyseq, Inc.). The full-length nucleotide, including splice variants resulting from these procedures are shown in the Sequence Listing as SEQ ID NO: 120-128. The corresponding amino acid sequences are SEQ ID NO: 266-274.

[0401] Table 1 shows the various tissue sources of SEQ ID NO: 120-128.

[0402] The homology results for SEQ ID NO: 120-128 were obtained by a BLASTP version 2.0al 19MP-WashU search against Genpept release 122 and Geneseq release 200105 (Derwent), using BLAST algorithm. The nearest neighbor result showed the homologs for SEQ ID NO: 120-128 from Genpept. The translated amino acid sequences for which the nucleic acid sequence encodes are shown in the Sequence Listing. The homologues with identifiable functions for SEQ ID NO: 120-128 are shown in Table 2 below.

[0403] Using eMatrix software package (Stanford University, Stanford, Calif.) (Wu et al., J. Comp. Biol., Vol. 6 pp. 219-235 (1999) herein incorporated by reference), all the sequences were examined to determine whether they had identifiable signature regions. Table 3 shows the signature region found in the indicated polypeptide sequences, the description of the signature, the eMatrix p-value(s) and the position(s) of the signature within the polypeptide sequence.

[0404] Using the pFam software program (Sonnhammer et al., Nucleic Acids Res., Vol. 26(1) pp. 320-322 (1998) herein incorporated by reference) all the polypeptide sequences were examined for domains with homology to certain peptide domains. Table 4 shows the name of the domain found, the description, the p-value and the pFam score for the identified domain within the sequence.

[0405] The nucleotide sequence within the sequences that codes for signal peptide sequences and their cleavage sites can be determine from using Neural Network SignalP V1.1 program (from Center for Biological Sequence Analysis, The Technical University of Denmark). The process for identifying prokaryotic and eukaryotic signal peptides and their cleavage sites are also disclosed by Henrik Nielson, Jacob Engelbrecht, Soren Brunak, and Gunnar von Heijne in the publication “Identification of prokaryotic and eukaryotic signal peptides and prediction of their cleavage sites” Protein Engineering, Vol. 10, no. 1, pp. 1-6 (1997), incorporated herein by reference. A maximum S score and a mean S score, as described in the Nielson et al as reference, was obtained for the polypeptide sequences. Table 7 shows the position of the signal peptide in each of the polypeptides and the maximum score and mean score associated with that signal peptide.

### 5.7 Example 7

[0406] Novel Nucleic Acids

[0407] Using PHRAP (Univ. of Washington) or CAP4 (Paracel), a full-length gene cDNA sequence and its corresponding protein sequence were generated from the assemblage. Any frame shifts and incorrect stop codons were corrected by hand editing. During editing, the sequence was checked using FASTY and/or BLAST against Genbank (i.e., dbEST version, gb pri, UniGene, Genpept). Other computer programs which may have been used in the editing process were phredPhrap and Consed (University of Washington) and ed-ready, ed-ext and gc-zip-2 (Hyseq, Inc.). The full-length nucleotide, including splice variants resulting from these procedures are shown in the Sequence Listing as SEQ ID NO: 129-146. The corresponding amino acid sequences are SEQ ID NO: 275-292.

[0408] Table 1 shows the various tissue sources of SEQ ID NO: 129-146.

[0409] The homology results for SEQ ID NO: 129-146 were obtained by a BLASTP version 2.0al 19MP-WashU search against Genpept release 122 and Geneseq release 200105 (Derwent), using BLAST algorithm. The nearest neighbor result showed the homologs for SEQ ID NO: 129-146 from Genpept. The translated amino acid sequences for which the nucleic acid sequence encodes are shown in the Sequence Listing. The homologues with identifiable functions for SEQ ID NO: 129-146 are shown in Table 2 below.

[0410] Using eMatrix software package (Stanford University, Stanford, Calif.) (Wu et al., J. Comp. Biol., Vol. 6 pp. 219-235 (1999) herein incorporated by reference), all the sequences were examined to determine whether they had identifiable signature regions. Table 3 shows the signature region found in the indicated polypeptide sequences, the description of the signature, the eMatrix p-value(s) and the position(s) of the signature within the polypeptide sequence.

[0411] Using the pFam software program (Sonnhammer et al., Nucleic Acids Res., Vol. 26(1) pp. 320-322 (1998) herein incorporated by reference) all the polypeptide sequences were examined for domains with homology to certain peptide domains. Table 4 shows the name of the domain found, the description, the p-value and the pFam score for the identified domain within the sequence.

[0412] The nucleotide sequence within the sequences that codes for signal peptide sequences and their cleavage sites can be determine from using Neural Network SignalP V1.1 program (from Center for Biological Sequence Analysis, The Technical University of Denmark). The process for identifying prokaryotic and eukaryotic signal peptides and their cleavage sites are also disclosed by Henrik Nielson, Jacob Engelbrecht, Soren Brunak, and Gunnar von Heijne in the publication “Identification of prokaryotic and eukaryotic signal peptides and prediction of their cleavage sites” Protein Engineering, Vol. 10, no. 1, pp. 1-6 (1997), incorporated herein by reference. A maximum S score and a mean S score, as described in the Nielson et al as reference, was obtained for the polypeptide sequences. Table 7 shows the position of the signal peptide in each of the polypeptides and the maximum score and mean score associated with that signal peptide.

[0413] Table 5 is a correlation table of all of the sequences and SEQ ID Nos.

TABLE 1

| | | Library | |
|---|---|---|---|
| Tissue origin | RNA Source | Name | SEQ ID NOS: |
| adult brain | GIBCO | AB3001 | 10 16 26 32 36 38 52-53 67 69 87 90 |
| | | | 102 112 |
| adult brain | GIBCO | ABD003 | 10 19-20 23 28 32 37 41-42 44 49 51 53 |
| | | | 55-56 61-64 69 71 75 81 83 87 89-90 |
| | | | 99 102 110 118 133 135 139 |
| adult brain | Clontech | ABR001 | 23 82 90 99 102 112 129 |
| adult brain | Clontech | ABR006 | 10 90 96 109-110 120 131 141-142 |
| adult brain | Clontech | ABR008 | 6 10-13 16-17 19-23 25-27 29 31-36 45 |
| | | | 47 49-50 61 64 68-69 73 75 79 85 89-90 |
| | | | 92-94 99 101 103-104 107-108 112 |
| | | | 117 122-123 126-127 130-131 135-137 |
| | | | 139 141-142 146 |
| adult brain | Clontech | ABR011 | 121 |
| adult brain | BioChain | ABR012 | 37 |
| adult brain | Invitrogen | ABR013 | 36 |
| adult brain | Invitrogen | ABR014 | 64 136-137 144 |
| adult brain | Invitrogen | ABR015 | 99 141-142 |
| adult brain | Invitrogen | ABT004 | 6 10 17 22 27 31-32 36 38 51 64 67 90 |
| | | | 95 98 141-142 |
| cultured | Stratagene | ADP001 | 4 12-13 22 37 42 71 101-102 106 126 |
| preadipocytes | | | 141-142 |
| adrenal gland | Clontech | ADR002 | 8 10 22 27 32-33 37 42 48-49 51 54 61 |
| | | | 66 69 81 84 95-96 100 110 116-117 122 |
| | | | 128 134-135 141-142 |
| adult heart | GIBCO | AHR001 | 4 6 8 10-11 13 17 22-23 25 27-29 31-34 |
| | | | 37 41-42 44 48 50 61-62 64 66 69-71 |
| | | | 74-75 85 89 95-99 103-104 110 112 |
| | | | 116 118 132 136-137 |
| adult kidney | GIBCO | AKD001 | 3-4 6 8 10-11 13 15 17 20-24 27-29 |
| | | | 32-37 41-42 44 49-51 53 56 60-66 69-71 |
| | | | 74 79 84-89 92-93 96 98-99 102-103 |
| | | | 110 113 116 118-119 125 130 132 135 |
| | | | 138 145 |
| adult kidney | Invitrogen | AKT002 | 3 8 27 29 32 37-38 52 60-61 71 74 84 |
| | | | 89 93 95 101 110 113 118 126 130 135 |
| | | | 138 140 146 |
| adult lung | GIBCO | ALG001 | 6 17-18 23 27 33 37 42 45 49 63 71 99 |
| | | | 132 138 |
| lymph node | Clontech | ALN001 | 8 17 29 37 42 53 56 61 64 110 118 125-126 |
| young liver | GIBCO | ALV001 | 4 6 8 10 18 22 29 32 48-49 62 74 92 |
| | | | 100 102 118 124 |
| adult liver | Invitrogen | ALV002 | 6 8 11 18 22 24-25 27 32-33 36 41 49 |
| | | | 63-65 99-101 113 116 134 |
| adult liver | Clontech | ALV003 | 136-137 |
| adult ovary | Invitrogen | AOV001 | 1 3-4 6 8-13 16-17 19-23 27-29 31-35 |
| | | | 37-38 40 42 44 48-52 56-58 60-61 63-64 |
| | | | 66 69-71 74-75 79 81 84-85 87-88 |
| | | | 92-93 98-99 101-104 107 110 112 116 |
| | | | 118 120 122 124 126 128 130 132-133 |
| | | | 138 141-142 |
| adult placenta | Clontech | APL001 | 4 29 49 92 139 |
| placenta | Invitrogen | APL002 | 35 44 50-51 88 98 141-142 |
| adult spleen | GIBCO | ASP001 | 6 10-11 16-17 32 37 41 47 51 56 61 63 |
| | | | 71-72 75 77 96 101 112 118 122 134 |
| | | | 136-137 |
| testis | GIBCO | ATS001 | 4 6 10-12 23 27 33-34 37 61 71 79 99 |
| | | | 118 120 126 130 132 135 |
| adult bladder | Invitrogen | BLD001 | 4 22 27 48 72 86 90 133 |
| bone marrow | Clontech | BMD001 | 1 3 5 8-9 20-21 23 26-27 30 32 37-38 |
| | | | 40 42 44 50-53 56 58-61 64 71-72 |
| | | | 74-75 77 83 86 88-89 93 95 100 104 107 |
| | | | 111 116 118-121 126 131-132 135-137 |
| | | | 139-140 144 |
| bone marrow | Clontech | BMD002 | 2-3 5 11 13 26 37 42 47 50 56 61 67-68 |
| | | | 71-72 77 79 91 95 100-101 104 107 110 |
| | | | 113-114 116 119 121-122 136-137 144 |
| bone marrow | Clontech | BMD004 | 77 |
| bone marrow | Clonetech | BMD007 | 77 136-137 |
| colon | Invitrogen | CLN001 | 32 35 51 87 |
| Mixture of 16 | Various | CTL021 | 5 49 71 77 |
| tissues - | Vendors* | | |
| mRNAs* | | | |
| adult cervix | BioChain | CVX001 | 1 4 8 11 13 19-20 26 28 32 41 44 51-52 |
| | | | 59 61 66 71 74 80 83 101 104 118 122 |
| | | | 125 132-133 141-142 |
| endothelial | Stratagene | EDT001 | 4 6 8-13 16-17 21-24 27-29 32-33 35 37 |
| cells | | | 41-42 44 46-47 49-50 52 56 58 61 64 |
| | | | 66 69-71 74 82 84 86 99-101 110 112 |
| | | | 116 118 121 133 135 138 |
| fetal brain | Clontech | FBR001 | 124 |
| fetal brain | Clontech | FBR004 | 120 127 |
| fetal brain | Clontech | FBR006 | 8 13 22 25 29 35 41-42 49 64 69 73 75-76 |
| | | | 79 92-93 100-101 112 122 124-125 |
| | | | 127 130 135 |
| fetal brain | Invitrogen | FBT002 | 22 29 34 49-50 88 104 134 |
| fetal heart | Invitrogen | FHR001 | 79 118 122 131 146 |
| fetal kidney | Clontech | FKD001 | 12 32 37 41-42 49 71 105 119 132 |
| fetal kidney | Clontech | FKD002 | 61 143 |
| fetal kidney | Invitrogen | FKD007 | 12 |
| fetal lung | Clontech | FLG001 | 3 34 56 61 77 95 |
| fetal lung | Invitrogen | FLG003 | 4 56 122 124 136-137 |
| fetal lung | Clontech | FLG004 | 61 |
| fetal liver- | Columbia | FLS001 | 1-9 11-25 27 29-30 32 35-38 41-51 56 |
| spleen | University | | 58 60-66 68-71 74-75 77-82 84-88 |
| | | | 91-99 101 103-105 107-116 118-119 122- |
| | | | 127 129-138 141-143 145-146 |
| fetal liver- | Columbia | FLS002 | 3-4 7 9 11 14-15 17-20 22-23 25-27 |
| spleen | University | | 29-30 32 38 41-43 45 47 49-51 53 56 58 63 |
| | | | 66 68-71 74-75 77 79 83 85-87 93 95 |
| | | | 97-98 100 104-105 107 110 112-114 |
| | | | 116 118-119 122 124-127 132 134 |
| | | | 136-138 141-142 145 |
| fetal liver- | Columbia | FLS003 | 5 83 85 104 124 126 136-137 |
| spleen | University | | |
| fetal liver | Invitrogen | FLV001 | 5-6 14-15 18 25 27 29 32 36 47 51 68 |
| | | | 84 88 95 107 115-116 136-137 |
| fetal liver | Clontech | FLV002 | 136-137 |
| fetal liver | Clontech | FLV004 | 27 47 95 106 113 |
| fetal muscle | Invitrogen | FMS001 | 27 41 47 61 71 77 86 88 99-100 122 |
| | | | 133 136-137 145 |
| fetal muscle | Invitrogen | FMS002 | 1 61 88 91 121 145-146 |
| fetal skin | Invitrogen | FSK001 | 1 3-6 8 12 14 19 29 35-36 41 47 51 61 |
| | | | 69 71 81 84 86-88 91 95 102 104 |
| | | | 111-113 124 138 |
| fetal skin | Invitrogen | FSK002 | 99 102 110 127-128 |
| fetal spleen | BioChain | FSP001 | 61 |
| umbilical | BioChain | FUC001 | 4-5 9-12 14 23 28-29 32 37-38 42 45 51 |
| cord | | | 56 61 66 71 82 84-85 90 97 102 104 |
| | | | 106 113 116 125 136-137 139 |
| fetal brain | GIBCO | HFB001 | 6-8 10-13 16-17 19 23 26-27 29 31-33 |
| | | | 35-36 41-42 48 50 55-56 58 61 66 71 |
| | | | 73-74 76 86 90 92 96 99 103 110 117 |
| | | | 125-126 128 131 138-139 143 |
| macrophage | Invitrogen | HMP001 | 21 132 |
| infant brain | Columbia | IB2002 | 5-7 10-11 19 22-23 25-26 31 36 38 |
| | University | | 48-49 51 54-55 61 64 69 73-75 85-87 90 |
| | | | 92-93 96 99-100 103 108 110 118 125 |
| | | | 127 134 136-137 |
| infant brain | Columbia | IB2003 | 38 51 61 85-86 88-90 99 117 123 |
| | University | | 125-126 |
| infant brain | Columbia | IBM002 | 86 |
| | University | | |
| infant brain | Columbia | IBS001 | 58 90 96 100 117 |
| | University | | |
| lung, | Stratagene | LFB001 | 48 10 13 27 34 37 42 52 56 63 71 96 |
| fibroblast | | | 116 122 126 |
| fibroblast | Stratagene | LFB001 | 4 8 10 13 27 34 37 42 52 56 63 71 96 |
| | | | 116 122 126 |
| lung tumor | Invitrogen | LGT002 | 4 7-9 11 13 17 19-20 23 31-32 35 37 |
| | | | 41-42 49-51 55-56 60 62-64 71 74-75 |
| | | | 78 84-85 88 93 96 99 101-102 105 112 |
| | | | 118 124 126 130 139 |
| lymphocytes | ATCC | LPC001 | 10 13 21 34-35 49 58 61 85-86 89 101 |
| | | | 103 112 121 128 136-137 |
| leukocyte | GIBCO | LUC001 | 6-11 13 17 23 26 29 32-35 37 41-42 44 |
| | | | 51-52 56 58-61 63-64 66 71-72 74-75 |
| | | | 85 87-89 96 103-104 107 110 112-113 |
| | | | 117-118 121 126 130 132 135-139 |
| leukocyte | Clontech | LUC003 | 13 15 17 37 51 61 139 |
| melanoma | Clontech | MEL004 | 8 13 28 40 42 49-50 62 69 71 86 126 134 |
| from cell line | | | |
| ATCC #CRL | | | |
| 1424 | | | |
| mammarygland | Invitrogen | MMG001 | 10-11 13-15 17-18 22-23 27 29 32 |
| | | | 35-37 41-42 45 49-51 58 61 63 71-72 |
| | | | 85-88 93 95 98 104 107 110 122 124-125 |
| | | | 130-131 133-135 141-142 |
| induced | Stratagene | NTD001 | 6 10 12 31 41 56 61 81 102 110 127 |
| neuron cells | | | |
| retinoic acid | Stratagene | NTR001 | 145 |
| induced | | | |
| neuronal cells | | | |
| neuronal cells | Stratagene | NTU001 | 8 47 49 61 124 129 135 146 |
| pituitary | Clontech | PIT004 | 52 81-82 132 135-137 |
| gland | | | |
| placenta | Clontech | PLA003 | 139 |
| prostate | Clontech | PRT001 | 10 23 28 49 54 60-61 64 69 133 135 |
| | | | 138 |
| rectum | Invitrogen | REC001 | 8 28-29 32 36 38 47 72 84-85 90 110 |
| | | | 132-133 135 |
| salivary gland | Clontech | SAL001 | 6 44 51-52 56 64 110 141-142 |
| small | Clontech | SIN001 | 4 38 60 71-72 74 89 94 112 117-118 |
| intestine | | | 120 125-126 133 135 138 141-142 |
| skeletal | Clontech | SKM001 | 8 70 130 |
| muscle | | | |
| spinal cord | Clontech | SPC001 | 1 3 14 63 70 93 99 112 118 122 126 |
| | | | 136-137 139 146 |
| adult spleen | Clontech | SPLc01 | 36 42 49 61 89 120 122 141-142 |
| stomach | Clontech | STO001 | 48 50 88 102 110 120 122 |
| thalamus | Clontech | THA002 | 8 22 42 54 88 90 117 |
| thymus | Clonetech | THM001 | 7 9 20 22 33 36-37 41 57 61 71 74 77 |
| | | | 81 85-86 88 93 96 114 132-134 |
| | | | 136-137 |
| thymus | Clontech | THMc02 | 10-11 29 33 37 50 53 59 77 79 88 91 |
| | | | 100 103 111-112 118-119 141-142 |
| thyroid gland | Clontech | THR001 | 1 4 8 10 23 25 28-29 34 38 44-45 51-52 |
| | | | 61 63-64 71 76 82 87 93 105 110 112 |
| | | | 124 126 129 132 135 143 |
| trachea | Clontech | TRC001 | 8 23 42 56 59 71 132 139 |
| uterus | Clontech | UTR001 | 10 32 41 53 59 61-62 99 145 |

*The 16 tissue-mRNAs and their vendor source, are as follows:
1) Normal adult brain mRNA (Invitrogen),
2) normal adult kidney mRNA (Invitrogen),
3) normal adult liver mRNA (Invitrogen),
4) normal fetal brain mRNA (Invitrogen),
5) normal fetal kidney mRNA (Invitrogen),
6) normal fetal liver mRNA (Invitrogen).
7) normal fetal skin mRNA (Invitrogen),
8) human adrenal gland mRNA (Clontech),
9) human bone marrow mRNA (Clontech),
10) human leukemia lymphablastic mRNA (Clontech),
11) human thymus mRNA (Clontech),
12) human lymph node mRNA (Clontech),
13) human spinal cord mRNA (Clontech),
14) human thyroid mRNA (Clontech),
15) human esophagus mRNA (BioChain),
16) human conceptional umbilical cord mRNA (BioChain).

[0414] TABLE 2

| SEQ | | | | Smith- | |
|---|---|---|---|---|---|
| ID | Accession | | | Waterman | % |
| NO: | Number | Species | Description | Score | Identity |
| 1 | U11031 | Rattus | BIG-1 protein | 213 | 25 |
| | | norvegicus | | | |
| 2 | AF156961 | Homo | gag | 1762 | 91 |
| | | sapiens | | | |
| 4 | Y70744 | Homo | PSEQ-2 protein encoded by NSEQ | 539 | 100 |
| | | sapiens | gene associated with matrix | | |
| | | | remodelling. | | |
| 5 | V00488 | Homo | alpha globin | 733 | 100 |
| | | sapiens | | | |
| 6 | Y79507 | Homo | Human carbohydrate-associated protein | 1521 | 100 |
| | | sapiens | CRBAP-3. | | |
| 7 | B45366 | Homo | Human secreted protein sequence | 221 | 65 |
| | | sapiens | encoded by gene 25 SEQ ID NO: 118. | | |
| 8 | X60036 | Homo | phosphate carrier protein | 1897 | 100 |
| | | sapiens | | | |
| 9 | X54942 | Homo | Cks1 protein homologue | 439 | 100 |
| | | sapiens | | | |
| 10 | X56468 | Homo | 14.3.3 protein | 1246 | 100 |
| | | sapiens | | | |
| 11 | X78136 | Homo | hnRNP-E2 | 1850 | 99 |
| | | sapiens | | | |
| 12 | AF129332 | Homo | MUM2 | 767 | 100 |
| | | sapiens | | | |
| 13 | AJ005259 | Homo | homologous to Bombyx mori | 749 | 100 |
| | | sapiens | multiprotein bridging | | |
| | | | factor (EMBL: AB001078) | | |
| 14 | B43515 | Homo | Human cancer associated | 640 | 99 |
| | | sapiens | protein sequence SEQ ID NO: 960. | | |
| 15 | K03473 | Homo | metallothionein I-F | 380 | 100 |
| | | sapiens | | | |
| 16 | AF161472 | Homo | HSPC123 | 496 | 78 |
| | | sapiens | | | |
| 17 | X98253 | Homo | ZNF183 | 1860 | 100 |
| | | sapiens | | | |
| 18 | M36803 | Homo | hemopexin | 2603 | 100 |
| | | sapiens | | | |
| 19 | AL031652 | Homo | dJ1119D9.3 (novel protein) | 1442 | 100 |
| | | sapiens | | | |
| 20 | AF019980 | Dictyostelium | ZipA | 173 | 24 |
| | | discoideum | | | |
| 21 | AF292100 | Homo | RP42 protein | 1365 | 99 |
| | | sapiens | | | |
| 22 | J02888 | Homo | quinone oxidoreductase | 513 | 95 |
| | | sapiens | | | |
| 23 | W67891 | Homo | Human secreted protein encoded | 2044 | 100 |
| | | sapiens | by gene 85 clone HBXFG80. | | |
| 24 | AF129756 | Homo | Apo M | 1016 | 100 |
| | | sapiens | | | |
| 25 | U87318 | Xenopus | NaDC-2 | 1161 | 55 |
| | | laevis | | | |
| 26 | AF241785 | Homo | NPD012 | 1418 | 100 |
| | | sapiens | | | |
| 27 | X12517 | Homo | C protein (AA 1-159) | 918 | 100 |
| | | sapiens | | | |
| 28 | X70476 | Homo | subunit of coatomer complex | 4751 | 100 |
| | | sapiens | | | |
| 29 | BC001029 | Homo | N-Acetylglucosamine kinase | 1249 | 99 |
| | | sapiens | | | |
| 30 | X08055 | Homo | preglycophorin B | 314 | 100 |
| | | sapiens | | | |
| 31 | AF320912 | Homo | MAGE-H1 | 1140 | 100 |
| | | sapiens | | | |
| 32 | AF197952 | Homo | thioredoxin peroxidase PMP20 | 345 | 94 |
| | | sapiens | | | |
| 33 | W88457 | Homo | Human lysophospholipase IHLP. | 1243 | 100 |
| | | sapiens | | | |
| 34 | AF151036 | Homo | HSPC202 | 808 | 100 |
| | | sapiens | | | |
| 35 | AL008583 | Homo | dJ327J16.1 (dynein, axonemal, | 565 | 100 |
| | | sapiens | light polypeptide 4) | | |
| 36 | L76200 | Homo | guanylate kinase | 198 | 100 |
| | | sapiens | | | |
| 37 | BC001773 | Homo | Similar to ribosomal protein L34 | 591 | 100 |
| | | sapiens | | | |
| 38 | AF216962 | Homo | ancient conserved domain protein 2 | 1743 | 93 |
| | | sapiens | | | |
| 39 | U05255 | Homo | glycophorin HeP2 | 245 | 97 |
| | | sapiens | | | |
| 40 | X51699 | Homo | bone Gla precursor (100 AA) | 526 | 100 |
| | | sapiens | | | |
| 41 | X83218 | Homo | ATP synthase, oligomycin | 1032 | 99 |
| | | sapiens | sensitivity conferring | | |
| | | | protein | | |
| 42 | X63527 | Homo | ribosomal protein L19 | 990 | 100 |
| | | sapiens | | | |
| 43 | B37410 | Homo | Human secreted protein BLAST | 116 | 55 |
| | | sapiens | search protein SEQ ID NO: 120. | | |
| 44 | AF149414 | Arabidopsis | contains similarity to Pfam family | 299 | 37 |
| | | thaliana | PF00145 (C-5 cytosine-specific | | |
| | | | DNA methylase); score = 10.4. | | |
| | | | E = 0.051, N = 1 | | |
| 45 | AY007220 | Homo | S100-type calcium binding | 541 | 100 |
| | | sapiens | protein A14 | | |
| 46 | X92896 | Homo | ITBA2 | 568 | 99 |
| | | sapiens | | | |
| 47 | U47924 | Homo | C8 | 1400 | 100 |
| | | sapiens | | | |
| 48 | AF243495 | Homo | hepatocellular carcinoma- | 2530 | 99 |
| | | sapiens | associated antigen 67 | | |
| 49 | AF311213 | Mus | MESDC2 | 1004 | 83 |
| | | musculus | | | |
| 50 | X12791 | Homo | 19 kD SRP-protein (AA 1-144) | 742 | 100 |
| | | sapiens | | | |
| 51 | AJ006973 | Homo | TOM1 | 2515 | 100 |
| | | sapiens | | | |
| 52 | Y57608 | Homo | Human apoptosis associated | 338 | 98 |
| | | sapiens | protein HAPOP-3. | | |
| 53 | X84194 | Homo | acylphosphatase | 200 | 100 |
| | | sapiens | | | |
| 54 | G00352 | Homo | Human secreted protein, | 228 | 68 |
| | | sapiens | SEQ ID NO: 4433. | | |
| 55 | AF221520 | Homo | basic helix-loop-helix | 1772 | 99 |
| | | sapiens | protein class B 1 | | |
| 56 | U14973 | Homo | ribosomal protein S29 | 313 | 98 |
| | | sapiens | | | |
| 57 | AF000944 | Rattus | TFIIA small subunit | 269 | 77 |
| | | norvegicus | | | |
| 58 | W69784 | Homo | Protein Kinase C | 628 | 100 |
| | | sapiens | Inhibitor-like Protein | | |
| | | | (IPKC-2). | | |
| 59 | M27784 | synthetic | stefin A | 508 | 100 |
| | | construct | | | |
| 60 | Y15909 | Homo | DIA-156 protein | 5638 | 99 |
| | | sapiens | | | |
| 61 | M58458 | Homo | ribosomal protein S4X | 660 | 99 |
| | | sapiens | isoform | | |
| 62 | X95384 | Homo | 14.5 kDa translational | 675 | 100 |
| | | sapiens | inhibitor protein, p14.5 | | |
| 63 | M92449 | Homo | putative | 1285 | 98 |
| | | sapiens | | | |
| 64 | U93868 | Homo | RNA polymerase III | 470 | 47 |
| | | sapiens | subunit | | |
| 65 | X76717 | Homo | MT-11 protein | 382 | 100 |
| | | sapiens | | | |
| 66 | D00678 | Homo | Human Hydrolase protein- | 1775 | 100 |
| | | sapiens | 3 (HYDRL-3) encoding | | |
| | | | cDNA. | | |
| 67 | AJ278219 | Homo | fatty acid hydroxylase | 1247 | 100 |
| | | sapiens | | | |
| 68 | G03032 | Homo | Human secreted protein, | 246 | 56 |
| | | sapiens | SEQ ID NO: 7113. | | |
| 69 | AF174593 | Homo | F-box protein Fb17 | 2355 | 100 |
| | | sapiens | | | |
| 70 | AB038021 | Homo | CLST 11240 protein | 516 | 100 |
| | | sapiens | | | |
| 71 | X77953 | Rattus | ribosomal protein S15a | 671 | 100 |
| | | norvegicus | | | |
| 72 | U24080 | Homo | immunoglobulin heavy | 624 | 93 |
| | | sapiens | chain VH3 | | |
| 73 | AF023268 | Homo | cotel | 470 | 41 |
| | | sapiens | | | |
| 74 | Y95008 | Homo | Human secreted protein | 472 | 45 |
| | | sapiens | vf3_1,SEQ ID NO:56. | | |
| 75 | AF308302 | Homo | serologically defined | 2003 | 97 |
| | | sapiens | breast cancer antigen NY- | | |
| | | | BR-96 | | |
| 76 | AL109653 | Homo | bG115M3.1 (novel protein) | 1874 | 55 |
| | | sapiens | | | |
| 77 | R15222 | Homo | Chronic myelogenous | 507 | 98 |
| | | sapiens | leukaemia-derived | | |
| | | | myeloid-related protein. | | |
| 78 | X85373 | Homo | Sm protein G | 387 | 100 |
| | | sapiens | | | |
| 79 | AF230533 | Homo | nuclear receptor | 3006 | 100 |
| | | sapiens | coactivator CIA | | |
| 80 | G03789 | Homo | Human secreted protein, | 156 | 73 |
| | | sapiens | SEQ ID NO: 7870. | | |
| 81 | AL035461 | Homo | dJ967N21.5(novel | 3096 | 100 |
| | | sapiens | MCM2/3/5 family | | |
| | | | member) | | |
| 82 | AK000022 | Homo | unnamed protein product | 493 | 100 |
| | | sapiens | | | |
| 83 | AF074016 | Homo | nonsense-mediated | 334 | 37 |
| | | sapiens | mRNA decay trans-acting | | |
| | | | factor | | |
| 84 | AF151076 | Homo | HSPC242 | 591 | 94 |
| | | sapiens | | | |
| 85 | AJ277841 | Homo | ELG protein | 1744 | 100 |
| | | sapiens | | | |
| 86 | AK000012 | Homo | unnamed protein product | 816 | 99 |
| | | sapiens | | | |
| 87 | AF309871 | Pichia | Gsa11p | 182 | 30 |
| | | pastoris | | | |
| 88 | Y22498 | Homo | Human secreted protein | 2355 | 99 |
| | | sapiens | sequence clone hb1041_2. | | |
| 89 | AF117649 | Drosophila | Adrift | 766 | 39 |
| | | melanogaster | | | |
| 90 | AF249745 | Homo | RhoGEF | 3389 | 99 |
| | | sapiens | | | |
| 91 | AF325191 | Homo | KRAB zinc finger protein | 332 | 85 |
| | | sapiens | HZF26 | | |
| 92 | AB035966 | Homo | testis-specific adriamycin | 2312 | 100 |
| | | sapiens | sensitivity protein | | |
| 93 | AL136125 | Homo | dJ304B14.2.1 (novel | 2257 | 100 |
| | | sapiens | protein isoform 1) | | |
| 94 | W23317 | Homo | Human prostate protein | 888 | 100 |
| | | sapiens | HPA32. | | |
| 95 | AF116640 | Homo | PRO1584 | 420 | 100 |
| | | sapiens | | | |
| 96 | AF182319 | Xenopus | 4g2 | 550 | 82 |
| | | laevis | | | |
| 97 | Y88618 | Homo | Human PTAN-1 amino | 2312 | 99 |
| | | sapiens | acid sequence. | | |
| 98 | AF056198 | Drosophila | Hsp70/Hsp90 organizing | 222 | 32 |
| | | melanogaster | protein homolog | | |
| 99 | AF161405 | Homo | HSPC287 | 724 | 100 |
| | | sapiens | | | |
| 100 | B21006 | Homo | Human nucleic acid- | 2397 | 100 |
| | | sapiens | binding protein, NuABP- | | |
| | | | 10. | | |
| 101 | AB004538 | Schizosacc | HYPOTHETICAL | 581 | 34 |
| | | haromyces | 59.2 KD PROTEIN IN | | |
| | | pombe | PFK26-SGA1 | | |
| | | | INTERGENIC REGION | | |
| 102 | W74763 | Homo | Human secreted protein | 132 | 100 |
| | | sapiens | encoded by gene 33 clone | | |
| | | | HTOJN06. | | |
| 103 | AF226869 | Homo | RB-associated KRAB | 292 | 54 |
| | | sapiens | represser | | |
| 104 | AF118088 | Homo | PRO2000 | 1865 | 100 |
| | | sapiens | | | |
| 105 | Y84440 | Homo | Amino acid sequence of a | 2659 | 100 |
| | | sapiens | human RNA-associated | | |
| | | | protein. | | |
| 106 | U32855 | Drosophila | cytoplasmic dynein light | 465 | 96 |
| | | melanogaster | chain 1 | | |
| 107 | AF116630 | Homo | PRO1278 | 508 | 98 |
| | | sapiens | | | |
| 108 | AB046628 | Macaca | hypothetical protein | 233 | 93 |
| | | fascicularis | | | |
| 109 | AL023494 | Homo | dJ366L4.2 (novel protein) | 669 | 100 |
| | | sapiens | | | |
| 110 | G02872 | Homo | Human secreted protein, | 288 | 58 |
| | | sapiens | SEQ ID NO: 6953. | | |
| 112 | AF151363 | Mus | Cdc42 GTPase-activating | 3204 | 78 |
| | | musculus | protein | | |
| 113 | AF130079 | Homo | PRO2852 | 272 | 65 |
| | | sapiens | | | |
| 114 | AK001575 | Homo | unnamed protein product | 1550 | 100 |
| | | sapiens | | | |
| 116 | B34974 | Homo | Human secreted protein | 434 | 100 |
| | | sapiens | sequence encoded by gene | | |
| | | | 46 SEQ ID NO: 178. | | |
| 117 | AJ272268 | Homo | calcium channel alpha2- | 5241 | 100 |
| | | sapiens | deltaS subunit | | |
| 118 | Z82083 | Caenorhabditis | ZK1010.2 | 330 | 30 |
| | | elegans | | | |
| 119 | AF155827 | Homo | proliferation-associated | 4300 | 99 |
| | | sapiens | SNF2-like protein | | |
| 120 | X17617 | Mus | zinc finger protein (AA 1-580) | 1007 | 49 |
| | | musculus | | | |
| 121 | AF043725 | Homo | PHD-finger protein | 298 | 41 |
| | | sapiens | | | |
| 122 | G03522 | Homo | Human secreted protein, | 735 | 100 |
| | | sapiens | SEQ ID NO: 7603. | | |
| 123 | X85373 | Homo | Sm protein G | 339 | 89 |
| | | sapiens | | | |
| 124 | M24496 | Mus | neurofilament largest subunit | 233 | 26 |
| | | musculus | | | |
| 125 | AF098066 | Homo | squamous cell carcinoma | 1747 | 51 |
| | | sapiens | antigen recognized by T cell | | |
| 126 | AY008372 | Homo | oxysterol binding protein- | 3491 | 100 |
| | | sapiens | related protein 3 | | |
| 127 | AF182037 | Rattus | Robo2 | 5093 | 93 |
| | | norvegicus | | | |
| 128 | AF150755 | Mus | microtubule-actin | 506 | 19 |
| | | musculus | crosslinking factor | | |
| 129 | U16802 | Rattus | Ca2+-dependent activator | 839 | 78 |
| | | norvegicus | protein; calcium- | | |
| | | | dependent actin-binding | | |
| | | | protein | | |
| 130 | Z50110 | Caenorhabditis | F18H3.1 | 282 | 40 |
| | | elegans | | | |
| 131 | Y21847 | Homo | Human signal peptide- | 1184 | 84 |
| | | sapiens | contianing protein (SIGP) | | |
| | | | (clone ID 1864292). | | |
| 132 | AF151879 | Homo | CGI-121 protein | 629 | 100 |
| | | sapiens | | | |
| 133 | AF099935 | Homo | MDC-3.13 isoform 2 | 590 | 56 |
| | | sapiens | | | |
| 134 | AF119848 | Homo | PRO1580 | 1275 | 99 |
| | | sapiens | | | |
| 135 | G04018 | Homo | Human secreted protein, | 397 | 98 |
| | | sapiens | SEQ ID NO: 8099. | | |
| 136 | V00489 | Homo | alpha globin | 648 | 99 |
| | | sapiens | | | |
| 137 | V00488 | Homo | alpha globin | 706 | 93 |
| | | sapiens | | | |
| 138 | W59929 | 791 | Human AAA-associated | 219 | 93 |
| | | | immunoglobulin reactive | | |
| | | | protein | | |
| 139 | Y87218 | Homo | Human secreted protein | 314 | 98 |
| | | sapiens | sequence SEQ ID NO: 257. | | |
| 140 | Y02666 | Homo | Human secreted protein | 221 | 100 |
| | | sapiens | encoded by gene 17 clone | | |
| | | | HLTAI94. | | |
| 141 | M97188 | Strongy- | tektin A1 | 246 | 45 |
| | | locentrotus | | | |
| | | purpuratus | | | |
| 142 | M97188 | Strongy- | tektin A1 | 179 | 35 |
| | | locentrotus | | | |
| | | purpuratus | | | |
| 143 | Y36212 | 791 | Human secreted protein | 1033 | 99 |
| 144 | R15222 | Homo | Chronic myelogenous | 614 | 99 |
| | | sapiens | leukaemia-derived | | |
| | | | myeloid-related protein. | | |
| 145 | Y73493 | Homo | Human secreted protein | 2165 | 100 |
| | | sapiens | clone yk224_1 protein | | |
| | | | sequence SEQ ID NO: 208. | | |
| 146 | U87306 | Rattus | transmembrane receptor | 4708 | 91 |
| | | norvegicus | UNC5H2 | | |

[0415] TABLE 3

| SEQ ID | Accession | | |
|---|---|---|---|
| NO: | Number | Description | Results* |
| 1 | PR00761 | BINDIN PRECURSOR | PR00761E 14.32 4.500e−10 |
| | | SIGNATURE | 460-479 PR00761E 14.32 |
| | | | 7.253e−09 459-478 |
| 5 | BL01033 | Globins profile. | BL01033A 16.94 3.250e−20 74-96 |
| | | | BL01033B 13.81 7.000e−14 |
| | | | 136-148 |
| 8 | BL00215 | Mitochondrial energy | BL00215A 15.82 8.500e−17 69-94 |
| | | transfer proteins. | BL00215B 10.44 8.714e−12 |
| | | | 206-219 BL00215A 15.82 7.319e−11 |
| | | | 166-191 |
| 9 | BL00944 | Cyclin-dependent | BL00944 17.47 1.000e−40 32-74 |
| | | kinases regulatory | |
| | | subunits proteins. | |
| 10 | BL00796 | 14-3-3 proteins. | BL00796C 17.44 1.000e−40 97-147 |
| | | | BL00796D 17.39 1.000e−40 148-194 |
| | | | BL00796E 14.15 1.000e−40 196-232 |
| | | | BL00796B 10.67 4.484e−37 35-68 |
| | | | BL00796A 10.52 3.571e−25 3-30 |
| 11 | PF00013 | KH domain proteins | PF00013 5.78 4.150e−09 112-124 |
| | | family of RNA binding | |
| | | proteins. | |
| 15 | PR00860 | VERTEBRATE | PR00860B 7.04 2.929e−20 27-41 |
| | | METALLOTHIONEIN | PR00860A 5.46 3.842e−15 5-18 |
| | | SIGNATURE | PR00860C 9.61 5.500e−15 41-51 |
| 17 | PF00642 | Zinc finger C-x8-C-x5- | PF00642 11.59 8.200e−11 211-222 |
| | | C-x3-H type (and | |
| | | similar). | |
| 18 | BL00546 | Matrixins cysteine | BL00546G 16.84 3.053e−09 |
| | | switch. | 110-130 |
| 19 | BL00310 | Lysosome-associated | BL00310A 14.05 2.102e−11 56-71 |
| | | membrane glycoproteins | |
| | | duplicated domain | |
| | | proteins. | |
| 25 | BL01271 | Sodium:sulfate | BL01271D 25.26 5.154e−38 480-535 |
| | | symporter family | BL01271B 12.02 6.400e−24 |
| | | proteins. | 208-233 BL01271A 8.06 7.955e−23 |
| | | | 132-152 BL01271C 13.62 7.429e−20 |
| | | | 407-429 |
| 27 | DM00215 | PROLINE-RICH | DM00215 19.43 3.898e−09 78-111 |
| | | PROTEIN 3. | |
| 28 | PR00962 | LETHAL(2) GIANT | PR00962D 10.40 9.511e−10 241-265 |
| | | LARVAE PROTEIN | |
| | | SIGNATURE | |
| 29 | BL00237 | G-protein coupled | BL00237D 11.23 1.000e−09 261-278 |
| | | receptors proteins. | |
| 30 | BL00312 | Glycophorin A proteins. | BL00312B 9.22 7.517e−32 37-66 |
| 33 | PF00756 | Putative esterase. | PF00756C 14.12 7.692e−10 119-149 |
| 35 | BL01239 | Dynein light chain type | BL01239 16.10 1.099e−13 32-86 |
| | | 1 proteins. | |
| 36 | BL00856 | Guanylate kinase | BL00856A 17.25 4.176e−11 8-21 |
| | | proteins. | |
| 37 | BL01145 | Ribosomal protein L34e | BL01145A 13.73 1.000e−40 3-45 |
| | | proteins. | BL01145B 14.65 2.636e−20 88-111 |
| 40 | PR00002 | BONE MATRIX GLA | PR00002A 11.56 7.000e−20 68-85 |
| | | DOMAIN | PR00002B 8.36 4.316e−13 87-98 |
| | | SIGNATURE | |
| 41 | BL00389 | ATP synthase delta | BL00389C 20.13 6.760e−25 168-206 |
| | | (OSCP) subunit | BL00389B 17.02 6.211e−13 |
| | | proteins. | 107-129 BL00389A 11.02 7.188e− |
| | | | 10 37-50 |
| 42 | BL00526 | Ribosomal protein L19e | BL00526A 19.50 1.000e−40 4-47 |
| | | proteins. | BL00526B 26.53 1.000e−40 53-100 |
| | | | BL00526C 20.60 1.000e−40 100-143 |
| 48 | PR00683 | SPECTRIN | PR00683B 16.62 5.558e−09 250-272 |
| | | PLECKSTRIN | |
| | | HOMOLOGY | |
| | | DOMAIN | |
| | | SIGNATURE | |
| 52 | PF00628 | PHD-finger. | PF00628 15.84 5.125e−11 37-52 |
| 53 | PR00112 | ACYLPHOSPHATASE | PR00112C 18.81 5.725e−23 4-25 |
| | | SIGNATURE | |
| 55 | BL00038 | Myc-type, ‘helix-loop- | BL00038B 16.97 5.395e−09 367-388 |
| | | helix’ dimerization | |
| | | domain proteins. | |
| 58 | BL00892 | HIT family proteins. | BL00892A 18.17 2.125e−10 3-34 |
| 59 | BL00287 | Cysteine proteases | BL00287 17.35 7.429e−19 39-63 |
| | | inhibitors proteins. | |
| 60 | PR00219 | SYNAPTOBREVIN | PR00219B 5.46 2.901e−09 528-548 |
| | | SIGNATURE | |
| 61 | BL00528 | Ribosomal protein S4e | BL00528B 24.75 1.000e−40 47-101 |
| | | proteins. | BL00528A 16.12 5.000e−36 3-36 |
| 62 | BL01094 | Hypothetical | BL01094B 20.31 1.000e−40 49-99 |
| | | YER057c/yjjV family | BL01094A 16.79 7.188e−35 9-42 |
| | | proteins. | BL01094C 18.20 5.821e−28 99-129 |
| 64 | PF00992 | Troponin. | PF00992A 16.67 6.451e−10 159-194 |
| 65 | PR00860 | VERTEBRATE | PR00860B 7.04 2.929e−20 27-41 |
| | | METALLOTHIONEIN | PR00860C 9.61 1.474e−14 41-51 |
| | | SIGNATURE | PR00860A 5.46 5.034e−13 5-18 |
| 66 | PD01922 | PROTEIN | PD01922B 21.83 7.000e−22 78-114 |
| | | PHOSPHODIESTERAS | |
| | | E HYDROL. | |
| 71 | BL00053 | Ribosomal protein S8 | BL00053C 16.71 5.500e−26 98-131 |
| | | proteins. | BL00053B 14.56 4.789e−14 58-76 |
| | | | BL00053A 8.83 5.320e−12 5-18 |
| 72 | DM00031 | IMMUNOGLOBULIN | DM00031A 16.80 1.000e−40 20-68 |
| | | V REGION. | DM00031B 15.41 1.000e−40 84-118 |
| 73 | PR00806 | VINCULIN | PR00806A 6.63 6.055e−09 142-153 |
| | | SIGNATURE | |
| 75 | BL00107 | Protein kinases ATP- | BL00107A 18.39 8.920e−13 148-179 |
| | | binding region proteins. | |
| 76 | PR00209 | ALPHA/BETA | PR00209B 4.88 1.978e−10 793-812 |
| | | GLIADIN FAMILY | PR00209B 4.88 3.739e−10 791-810 |
| | | SIGNATURE | PR00209B 4.88 8.500e−09 792-811 |
| 77 | BL00269 | Mammalian defensins | BL00269C 16.52 6.786e−26 352-381 |
| | | proteins. | BL00269A 8.53 2.607e−20 287-307 |
| | | | BL00269B 19.17 2.800e−18 |
| | | | 148-177 BL00269B 19.17 5.500e−17 |
| | | | 314-343 BL00269A 8.53 |
| | | | 2.731e−14 122-142 |
| 78 | PD01861 | PROTEIN NUCLEAR | PD01861A 14.06 1.265e−19 24-48 |
| | | RIBONUCLEOPROTEIN | PD01861B 8.80 2.241e−11 58-71 |
| | | SMALL MRNA | |
| | | RNA. | |
| 81 | BL00717 | Sigma-54 factors family | BL00717B 10.07 3.538e−09 729-740 |
| | | proteins. | |
| 85 | BL00412 | Neuromodulin (GAP- | BL00412D 16.54 8.773e−11 46-97 |
| | | 43) proteins. | |
| 86 | BL00415 | Synapsins proteins. | BL00415N 4.29 4.153e−09 37-81 |
| 90 | BL00741 | Guanine-nucleotide | BL00741B 14.27 8.138e−13 416-439 |
| | | dissociation, stimulators | |
| | | CDC24 family sign. | |
| 91 | PD01066 | PROTEIN ZINC | PD01066 19.43 9.438e−37 6-45 |
| | | FINGER ZINC- | |
| | | FINGER METAL- | |
| | | BINDING NU. | |
| 100 | PD01066 | PROTEIN ZINC | PD01066 19.43 2.915e−29 53-92 |
| | | FINGER ZINC- | |
| | | FINGER METAL- | |
| | | BINDING NU. | |
| 103 | PD01066 | PROTEIN ZINC | PD01066 19.43 9.750e−35 10-49 |
| | | FINGER ZINC- | |
| | | FINGER METAL- | |
| | | BINDING NU. | |
| 104 | PR00503 | BROMODOMAIN | PR00503B 9.96 4.800e−12 336-353 |
| | | SIGNATURE | |
| 106 | BL01239 | Dynein light chain type | BL01239 16.10 1.000e−40 17-71 |
| | | 1 proteins. | |
| 112 | PD00930 | PROTEIN GTPASE | PD00930B 33.72 9.769e−21 138-179 |
| | | DOMAIN | |
| | | ACTIVATION. | |
| 116 | BL00157 | Ribulose bisphosphate | BL00157F 7.84 9.757e−10 27-81 |
| | | carboxylase large chain | |
| | | proteins. | |
| 117 | PD01101 | INHIBITOR HEAVY | PD01101B 21.53 1.692e−23 144-197 |
| | | CHAIN CHANNEL IN. | |
| 119 | BL00039 | DEAD-box subfamily | BL00039D 21.67 4.732e−11 670-716 |
| | | ATP-dependent | |
| | | helicases proteins. | |
| 120 | PD00066 | PROTEIN ZINC- | PD00066 13.92 4.462e−15 257-270 |
| | | FINGER METAL- | PD00066 13.92 1.600e−14 229-242 |
| | | BINDI. | PD00066 13.92 3.400e−14 145-158 |
| | | | PD00066 13.92 4.600e−14 201-214 |
| | | | PD00066 13.92 8.800e−14 173-186 |
| | | | PD00066 13.92 2.200e−09 89-102 |
| | | | PD00066 13.92 3.700e−09 369-382 |
| 122 | PR00652 | 5- | PR00652B 5.29 9.505e−09 119-140 |
| | | HYDROXYTRYPTAMINE | |
| | | 7 RECEPTOR | |
| | | SIGNATURE | |
| 123 | PD01861 | PROTEIN NUCLEAR | PD01861A 14.06 1.000e−15 24-48 |
| | | RIBONUCLEOPROTEIN | |
| | | SMALL MRNA | |
| | | RNA. | |
| 124 | PF00992 | Troponin. | PF00992A 16.67 1.380e−10 596-631 |
| | | | PF00992A 16.67 4.316e−09 602-637 |
| 125 | DM00396 | 5 kw INTRON COI | DM00396A 5.97 7.429e−09 301-309 |
| | | ND4L ND5. | |
| 126 | BL01013 | Oxysterol-binding | BL01013A 25.14 5.500e−21 329-365 |
| | | protein family proteins. | BL01013D 26.81 2.161e−18 599-643 |
| | | | BL01013C 9.97 4.231e−13 417-427 |
| | | | BL01013B 11.33 3.017e−11 395-406 |
| 127 | DM00179 | w KINASE ALPHA | DM00179 13.97 9.053e−10 481-491 |
| | | ADHESION T-CELL. | |
| 136 | BL01033 | Globins profile. | BL01033B 13.81 7.000e−14 123-135 |
| 137 | BL01033 | Globins profile. | BL01033A 16.94 3.250e−20 74-96 |
| | | | BL01033B 13.81 7.000e−14 146-158 |
| 141 | PR00511 | TEKTIN SIGNATURE | PR00511A 13.59 3.700e−14 113-130 |
| 144 | BL00269 | Mammalian defensins | BL00269C 16.52 6.786e−26 96-125 |
| | | proteins. | BL00269A 8.53 2.607e−20 31-51 |
| | | | BL00269B 19.17 5.500e−17 58-87 |
| 146 | PD01719 | PRECURSOR | PD01719A 12.89 9.143e−14 249-277 |
| | | GLYCOPROTEIN | |
| | | SIGNAL RE. | |

*Results include in order: accession number subtype; raw score; p-value; position of signature in amino acid sequence

[0416] TABLE 4

| SEQ ID | | | | pFam |
|---|---|---|---|---|
| NO: | pFam Name | Description | p-value | Score |
| 1 | ig | Immunoglobulin domain | 2.8e−22 | 76.9 |
| 2 | Gag_p30 | Gag P30 core shell protein | 9.2e−19 | 69.2 |
| 5 | globin | Globin | 4.6e−57 | 203.0 |
| 8 | mito_carr | Mitochondrial carrier proteins | 1.5e−112 | 387.3 |
| 9 | CKS | Cyclin-dependent kinase regulatory | 8.5e−50 | 178.9 |
| | | subunit | | |
| 10 | 14-3-3 | 14-3-3 proteins | 1.1e−147 | 504.0 |
| 11 | KH-domain | KH domain | 1.6e−49 | 177.9 |
| 13 | HTH_3 | Helix-turn-helix | 6.5e−13 | 56.3 |
| 15 | metalthio | Metallothionein | 1.2e−24 | 95.4 |
| 17 | zf-CCCH | Zinc finger C-x8-C-x5-C-x3-H type | 9.1e−10 | 39.9 |
| 18 | hemopexin | Hemopexin | 2.4e−58 | 207.3 |
| 25 | Na_sulph_symp | Sodium:sulfate symporter transmembrane | 7.3e−136 | 464.8 |
| 28 | WD40 | WD domain, G-beta repeat | 7.5e−54 | 192.3 |
| 29 | 7tm_1 | 7 transmembrane receptor (rhodopsin | 4.5e−10 | 34.2 |
| | | family) | | |
| 30 | Glycophorin_A | Glycophorin A | 2.3e−20 | 71.7 |
| 31 | MAGE | MAGE family | 0.05 | −101.0 |
| 33 | abhydrolase_2 | Phospholipase/Carboxylesterase | 8.6e−30 | 112.4 |
| 35 | Dynein_light | Dynein light chain type 1 | 1.3e−12 | 55.3 |
| 37 | Ribosomal_L34e | Ribosomal protein L34e | 1e−65 | 231.7 |
| 38 | cNMP_binding | Cyclic nucleotide-binding domain | 0.05 | 10.1 |
| 40 | gla | Vitamin K-dependent | 2.2e−15 | 64.6 |
| | | carboxylation/gamma-carb | | |
| 41 | OSCP | ATP synthase delta (OSCP) subunit | 2.7e−75 | 257.7 |
| 42 | Ribosomal_L19e | Ribosomal protein L19e | 3.6e−104 | 359.5 |
| 45 | S_100 | S-100/ICaBP type calcium binding | 2.9e−08 | 40.9 |
| | | domain | | |
| 48 | Sec7 | Sec7 domain | 3.7e−65 | 229.9 |
| 50 | SRP19 | SRP19 protein | 1.2e−25 | 98.7 |
| 51 | VHS | VHS domain | 9.6e−71 | 248.4 |
| 52 | PHD | PHD-finger | 0.00025 | 23.2 |
| 53 | Acylphosphatase | Acylphosphatase | 0.014 | −6.9 |
| 55 | HLH | Helix-loop-helix DNA-binding domain | 5e−05 | 30.1 |
| 56 | Ribosomal_S14 | Ribosomal protein S14p/S29e | 7.5e−20 | 68.3 |
| 57 | TFIIA_gamma | Transcription initiation factor IIA, gamm | 2.6e−31 | 117.5 |
| 58 | HIT | HIT family | 0.0001 | 4.1 |
| 59 | cystatin | Cystatin domain | 5.7e−28 | 100.2 |
| 60 | FH2 | Formin Homology 2 Domain | 1.3e−187 | 636.7 |
| 61 | Ribosomal_S4e | Ribosomal family S4e | 4.6e−08 | 40.2 |
| 62 | UPF0076 | Domain of unknown function UPF0076 | 9.9e−68 | 238.4 |
| 65 | metalthio | Metallothionein | 2.2e−23 | 91.1 |
| 68 | PX | PX domain | 1.7e−09 | 45.0 |
| 69 | F-box | F-box domain. | 3.2e−09 | 44.1 |
| 71 | Ribosomal_S8 | Ribosomal protein S8 | 6e−58 | 192.1 |
| 72 | ig | Immunoglobulin domain | 3.1e−12 | 44.5 |
| 75 | pkinase | Eukaryotic protein kinase domain | 1.1e−30 | 114.5 |
| 76 | LRR | Leucine Rich Repeat | 1.1e−30 | 115.4 |
| 77 | Defensin_propep | Defensin propeptide | 2.5e−46 | 167.3 |
| 78 | Sm | Sm protein | 1.1e−24 | 95.5 |
| 81 | MCM | MCM2/3/5 family | 1.1e−118 | 407.7 |
| 89 | FtsJ | FtsJ cell division protein | 0.00037 | −37.0 |
| 90 | RhoGEF | RhoGEF domain | 7e−39 | 142.6 |
| 91 | KRAB | KRAB box | 1e−40 | 148.7 |
| 97 | HMG_box | HMG (high mobility group) box | 0.078 | −8.3 |
| 98 | TPR | TPR Domain | 4.1e−15 | 63.6 |
| 100 | zf-C2H2 | Zinc finger, C2H2 type | 1.3e−65 | 231.4 |
| 103 | KRAB | KRAB box | 7.4e−37 | 135.9 |
| 104 | bromodomain | Bromodomain | 4.2e−18 | 67.2 |
| 105 | rrm | RNA recognition motif. | 1.2e−09 | 45.5 |
| 106 | Dynein_light | Dynein light chain type 1 | 3.5e−66 | 233.3 |
| 112 | RhoGAP | RhoGAP domain | 6.7e−49 | 175.9 |
| 119 | SNF2_N | SNF2 and others N-terminal domain | 2.2e−104 | 360.2 |
| 120 | zf-C2H2 | Zinc finger, C2H2 type | 8.7e−57 | 202.1 |
| 123 | Sm | Sm protein | 3.9e−20 | 80.3 |
| 126 | Oxysterol_BP | Oxysterol-binding protein | 3.4e−78 | 273.2 |
| 127 | ig | Immunoglobulin domain | 2.8e−53 | 176.7 |
| 136 | globin | Globin | 8.8e−42 | 150.1 |
| 137 | globin | Globin | 3.4e−53 | 189.9 |
| 144 | Defensin_propep | Defensin propeptide | 3e−25 | 97.3 |
| 146 | ZU5 | ZU5 domain | 9.3e−57 | 202.0 |

[0417] TABLE 5

| SEQ ID NO: | SEQ ID NO: | SEQ ID NO: | SEQ ID NO: | Priority docket | | |
|---|---|---|---|---|---|---|
| of full-length | of full-length | of contig | of contig | number_corresponding | SEQ ID NO: | |
| nucleotide | peptide | nucleotide | peptide | SEQ ID NO: in | in USSN | SEQ ID NO: in USSN |
| sequence | sequence | sequence | sequence | priority application | 09/552,929 | 09/770,160 |
| 1 | 147 | 293 | 439 | 791CIP2A_1 | 151 | 151 |
| 2 | 148 | 294 | 440 | 791CIP2A_2 | 608 | 608 |
| 3 | 149 | 295 | 441 | 791CIP2A_3 | 649 | 649 |
| 4 | 150 | 296 | 442 | 791CIP2A_4 | 940 | 940 |
| 5 | 151 | 297 | 443 | 791CIP2A_5 | 954 | 954 |
| 6 | 152 | 298 | 444 | 791CIP2A_7 | 1009 | 1009 |
| | | | | | 1010 | 1010 |
| 7 | 153 | 299 | 445 | 791CIP2A_8 | 1030 | 1030 |
| 8 | 154 | 300 | 446 | 791CIP2A_9 | 1033 | 1033 |
| 9 | 155 | 301 | 447 | 791CIP2A_10 | 1036 | 1036 |
| | | | | | 1037 | 1037 |
| 10 | 156 | 302 | 448 | 791CIP2A_11 | 1051 | 1051 |
| 11 | 157 | 303 | 449 | 791CIP2A_12 | 1070 | 1070 |
| | | | | | 1071 | 1071 |
| | | | | | 1072 | 1072 |
| | | | | | 1073 | 1073 |
| | | | | | 1074 | 1074 |
| 12 | 158 | 304 | 450 | 791CIP2A_13 | 1091 | 1091 |
| 13 | 159 | 305 | 451 | 791CIP2A_14 | 1092 | 1092 |
| | | | | | 1093 | 1093 |
| 14 | 160 | 306 | 452 | 791CIP2A_15 | 1108 | 1108 |
| | | | | | 1109 | 1109 |
| | | | | | 1110 | 1110 |
| 15 | 161 | 307 | 453 | 791CIP2A_16 | 1136 | 1136 |
| | | | | | 1137 | 1137 |
| | | | | | 1138 | 1138 |
| | | | | | 1139 | 1139 |
| 16 | 162 | 308 | 454 | 791CIP2A_17 | 1181 | 1181 |
| 17 | 163 | 309 | 455 | 791CIP2A_18 | 1197 | 1197 |
| | | | | | 1198 | 1198 |
| 18 | 164 | 310 | 456 | 791CIP2A_19 | 1220 | 1220 |
| | | | | | 1221 | 1221 |
| 19 | 165 | 311 | 457 | 791CIP2A_20 | 1247 | 1247 |
| 20 | 166 | 312 | 458 | 791CIP2A_21 | 1268 | 1268 |
| | | | | | 1269 | 1269 |
| 21 | 167 | 313 | 459 | 791CIP2A_22 | 1328 | 1328 |
| | | | | | 1329 | 1329 |
| 22 | 168 | 314 | 460 | 791CIP2A_23 | 1330 | 1330 |
| | | | | | 1331 | 1331 |
| | | | | | | 1332 |
| | | | | | 1332 | |
| 23 | 169 | 315 | 461 | 791CIP2A_24 | 1360 | 1360 |
| | | | | | 1361 | 1361 |
| | | | | | 1362 | 1362 |
| 24 | 170 | 316 | 462 | 791CIP2A_25 | 1390 | 1390 |
| 25 | 171 | 317 | 463 | 791CIP2A_26 | 1393 | 1393 |
| | | | | | 1394 | 1394 |
| | | | | | 1395 | 1395 |
| | | | | | 1396 | 1396 |
| | | | | | 1397 | 1397 |
| | | | | | 1398 | 1398 |
| | | | | | 1399 | 1399 |
| | | | | | 1400 | 1400 |
| 26 | 172 | 318 | 464 | 791CIP2A_27 | 1412 | 1412 |
| | | | | | 1413 | 1413 |
| | | | | | 1414 | 1414 |
| 27 | 173 | 319 | 465 | 791CIP2A_28 | 1416 | 1416 |
| 28 | 174 | 320 | 466 | 791CIP2A_29 | 1435 | 1435 |
| | | | | | 1436 | 1436 |
| 29 | 175 | 321 | 467 | 791CIP2A_30 | 1437 | 1437 |
| | | | | | 1438 | 1438 |
| | | | | | 1439 | 1439 |
| | | | | | 1440 | 1440 |
| | | | | | 1441 | 1441 |
| | | | | | 1442 | 1442 |
| | | | | | 1443 | 1443 |
| | | | | | 1444 | 1444 |
| | | | | | 1445 | 1445 |
| 30 | 176 | 322 | 468 | 791CIP2A_31 | 1474 | 1474 |
| | | | | | 1475 | 1475 |
| | | | | | 1476 | 1476 |
| 31 | 177 | 323 | 469 | 791CIP2A_32 | 1508 | 1508 |
| 32 | 178 | 324 | 470 | 791CIP2A_33 | 1517 | 1517 |
| | | | | | 1518 | 1518 |
| | | | | | 1519 | 1519 |
| 33 | 179 | 325 | 471 | 791CIP2A_34 | 1528 | 1528 |
| | | | | | 1529 | 1529 |
| 34 | 180 | 326 | 472 | 791CIP2A_35 | 1543 | 1543 |
| | | | | | 1544 | 1544 |
| 35 | 181 | 327 | 473 | 791CIP2A_36 | 1596 | 1596 |
| 36 | 182 | 328 | 474 | 791CIP2A_37 | 1609 | 1609 |
| | | | | | 1610 | 1610 |
| | | | | | 1611 | 1611 |
| 37 | 183 | 329 | 475 | 791CIP2A_38 | 1619 | 1619 |
| | | | | | 1620 | 1620 |
| 38 | 184 | 330 | 476 | 791CIP2A_39 | 1644 | 1644 |
| 39 | 185 | 331 | 477 | 791CIP2A_40 | 1698 | 1698 |
| | | | | | 1699 | 1699 |
| | | | | | 1700 | 1700 |
| 40 | 186 | 332 | 478 | 791CIP2A_41 | 1714 | 1714 |
| 41 | 187 | 333 | 479 | 791CIP2A_42 | 1743 | 1743 |
| | | | | | 1744 | 1744 |
| 42 | 188 | 334 | 480 | 791CIP2A_43 | 1834 | 1834 |
| | | | | | 1835 | 1835 |
| 43 | 189 | 335 | 481 | 791CIP2A_44 | 1847 | 1847 |
| 44 | 190 | 336 | 482 | 791CIP2A_45 | 1887 | 1887 |
| | | | | | 1888 | 1888 |
| | | | | | 1889 | 1889 |
| | | | | | 1890 | 1890 |
| | | | | | 1891 | 1891 |
| | | | | | 1892 | 1892 |
| 45 | 191 | 337 | 483 | 791CIP2A_46 | 1981 | 1981 |
| 46 | 192 | 338 | 484 | 791CIP2A_47 | 2033 | 2033 |
| | | | | | 2034 | 2034 |
| 47 | 193 | 339 | 485 | 791CIP2A_48 | 2063 | 2063 |
| | | | | | 2064 | 2064 |
| 48 | 194 | 340 | 486 | 791CIP2A_49 | 2119 | 2119 |
| | | | | | 2120 | 2120 |
| | | | | | 2121 | 2121 |
| | | | | | 2122 | 2122 |
| 49 | 195 | 341 | 487 | 791CIP2A_50 | 2138 | 2138 |
| | | | | | 2139 | 2139 |
| | | | | | 2140 | 2140 |
| 50 | 196 | 342 | 488 | 791CIP2A_51 | 2141 | 2141 |
| | | | | | 2142 | 2142 |
| | | | | | 2143 | 2143 |
| 51 | 197 | 343 | 489 | 791CIP2A_52 | 2189 | 2189 |
| | | | | | 2190 | 2190 |
| | | | | | 2191 | 2191 |
| | | | | | 2192 | 2192 |
| 52 | 198 | 344 | 490 | 791CIP2A_53 | 2194 | 2194 |
| | | | | | 2195 | 2195 |
| | | | | | 2196 | 2196 |
| 53 | 199 | 345 | 491 | 791CIP2A_54 | 2200 | 2200 |
| 54 | 200 | 346 | 492 | 791CIP2A_55 | 2247 | 2247 |
| | | | | | 2248 | 2248 |
| | | | | | 2249 | 2249 |
| | | | | | 2250 | 2250 |
| | | | | | 2251 | 2251 |
| | | | | | 2252 | 2252 |
| | | | | | 2253 | 2253 |
| 55 | 201 | 347 | 493 | 791CIP2A_56 | 2255 | 2255 |
| 56 | 202 | 348 | 494 | 791CIP2A_57 | 2288 | 2288 |
| | | | | | 2289 | 2289 |
| | | | | | 2290 | 2290 |
| 57 | 203 | 349 | 495 | 791CIP2A_58 | 2311 | 2311 |
| | | | | | 2312 | 2312 |
| 58 | 204 | 350 | 496 | 791CIP2A_59 | 2324 | 2324 |
| | | | | | 2325 | 2325 |
| 59 | 205 | 351 | 497 | 791CIP2A_60 | 2334 | 2334 |
| 60 | 206 | 352 | 498 | 791CIP2A_61 | 2340 | 2340 |
| | | | | | 2341 | 2341 |
| 61 | 207 | 353 | 499 | 791CIP2A_62 | 2353 | 2353 |
| | | | | | 2354 | 2354 |
| | | | | | 2355 | 2355 |
| 62 | 208 | 354 | 500 | 791CIP2A_63 | 2373 | 2373 |
| | | | | | 2374 | 2374 |
| 63 | 209 | 355 | 501 | 791CIP2A_64 | 2401 | 2401 |
| | | | | | 2402 | 2402 |
| 64 | 210 | 356 | 502 | 791CIP2A_65 | 2403 | 2403 |
| | | | | | 2404 | 2404 |
| | | | | | 2405 | 2405 |
| | | | | | 2406 | 2406 |
| 65 | 211 | 357 | 503 | 791CIP2A_66 | 2424 | 2424 |
| | | | | | 2425 | 2425 |
| 66 | 212 | 358 | 504 | 791CIP2A_67 | 2756 | 2756 |
| | | | | | 2757 | 2757 |
| 67 | 213 | 359 | 505 | 791CIP2A_68 | 2811 | 2811 |
| 68 | 214 | 360 | 506 | 791CIP2A_69 | 2844 | 2844 |
| 69 | 215 | 361 | 507 | 791CIP2A_70 | 2854 | 2854 |
| | | | | | 2855 | 2855 |
| | | | | | 2856 | 2856 |
| | | | | | 2857 | 2857 |
| | | | | | 2858 | 2858 |
| | | | | | 2859 | 2859 |
| | | | | | 2860 | 2860 |
| 70 | 216 | 362 | 508 | 791CIP2A_71 | 2861 | 2861 |
| | | | | | 2862 | 2862 |
| | | | | | 2863 | 2863 |
| 71 | 217 | 363 | 509 | 791CIP2A_72 | 2882 | 2882 |
| | | | | | 2883 | 2883 |
| | | | | | 2884 | 2884 |
| 72 | 218 | 364 | 510 | 791CIP2A_73 | 2899 | 2899 |
| | | | | | 2900 | 2900 |
| | | | | | 2901 | 2901 |
| | | | | | 2902 | 2902 |
| | | | | | 2903 | 2903 |
| 73 | 219 | 365 | 511 | 791CIP2A_74 | 2938 | 2938 |
| 74 | 220 | 366 | 512 | 791CIP2A_75 | 2974 | 2974 |
| | | | | | 2975 | 2975 |
| | | | | | 2976 | 2976 |
| | | | | | 2977 | 2977 |
| 75 | 221 | 367 | 513 | 791CIP2A_76 | 2980 | 2980 |
| | | | | | 2981 | 2981 |
| | | | | | 2982 | 2982 |
| | | | | | 2983 | 2983 |
| | | | | | 2984 | 2984 |
| | | | | | 2985 | 2985 |
| | | | | | 2986 | 2986 |
| 76 | 222 | 368 | 514 | 791CIP2A_77 | 3000 | 3000 |
| | | | | | 3001 | 3001 |
| 77 | 223 | 369 | 515 | 791CIP2A_78 | 3045 | 3045 |
| 78 | 224 | 370 | 516 | 791CIP2A_79 | 3083 | 3083 |
| 79 | 225 | 371 | 517 | 791CIP2A_80 | 3111 | 3111 |
| 80 | 226 | 372 | 518 | 791CIP2A_81 | 3138 | 3138 |
| 81 | 227 | 373 | 519 | 791CIP2A_82 | 3160 | 3160 |
| | | | | | 3161 | 3161 |
| 82 | 228 | 374 | 520 | 791CIP2A_83 | 3382 | 3382 |
| 83 | 229 | 375 | 521 | 791CIP2A_84 | 3503 | 3503 |
| 84 | 230 | 376 | 522 | 791CIP2A_85 | 3934 | 3934 |
| | | | | | 3935 | 3935 |
| | | | | | 3936 | 3936 |
| | | | | | 3937 | 3937 |
| 85 | 231 | 377 | 523 | 791CIP2A_86 | 4214 | 4214 |
| | | | | | 4215 | 4215 |
| | | | | | 4216 | 4216 |
| 86 | 232 | 378 | 524 | 791CIP2A_87 | 4341 | 4341 |
| 87 | 233 | 379 | 525 | 791CIP2A_88 | 4385 | 4385 |
| 88 | 234 | 380 | 526 | 791CIP2A_89 | 4874 | 4874 |
| 89 | 235 | 381 | 527 | 791CIP2A_90 | 5591 | 5591 |
| 90 | 236 | 382 | 528 | 791CIP2A_91 | 5597 | 5597 |
| | | | | | 5598 | 5598 |
| | | | | | 5599 | 5599 |
| | | | | | 5600 | 5600 |
| | | | | | 5601 | 5601 |
| | | | | | 5602 | 5602 |
| 91 | 237 | 383 | 529 | 791CIP2B_1 | 282 | 282 |
| | | | | | 283 | 283 |
| | | | | | 284 | 284 |
| 92 | 238 | 384 | 530 | 791CIP2B_2 | 305 | 305 |
| 93 | 239 | 385 | 531 | 791CIP2B_3 | 657 | 657 |
| | | | | | 658 | 658 |
| | | | | | 659 | 659 |
| | | | | | 660 | 660 |
| 94 | 240 | 386 | 532 | 791CIP2B_4 | 803 | 803 |
| 95 | 241 | 387 | 533 | 791CIP2B_5 | 906 | 906 |
| | | | | | 907 | 907 |
| | | | | | 908 | 908 |
| | | | | | 909 | 909 |
| 96 | 242 | 388 | 534 | 791CIP2B_6 | 2265 | 2265 |
| 97 | 243 | 389 | 535 | 791CIP2B_7 | 2474 | 2474 |
| 98 | 244 | 390 | 536 | 791CIP2B_8 | 2758 | 2758 |
| | | | | | 2759 | 2759 |
| | | | | | 2760 | 2760 |
| 99 | 245 | 391 | 537 | 791CIP2B_9 | 2892 | 2892 |
| 100 | 246 | 392 | 538 | 791CIP2B_11 | 3724 | 3724 |
| 101 | 247 | 393 | 539 | 791CIP2B_12 | 4059 | 4059 |
| 102 | 248 | 394 | 540 | 791CIP2B_13 | 4258 | 4258 |
| 103 | 249 | 395 | 541 | 791CIP2B_14 | 5253 | 5253 |
| 104 | 250 | 396 | 542 | 791CIP2B_15 | 5509 | 5509 |
| 105 | 251 | 397 | 543 | 791CIP2B_16 | 5526 | 5526 |
| 106 | 252 | 398 | 544 | 791CIP2C_1 | 70 | 70 |
| 107 | 253 | 399 | 545 | 791CIP2C_2 | 239 | 239 |
| 108 | 254 | 400 | 546 | 791CIP2C_3 | 376 | 376 |
| 109 | 255 | 401 | 547 | 791CIP2C_4 | 862 | 862 |
| 110 | 256 | 402 | 548 | 791CIP2C_5 | 1753 | 1753 |
| 111 | 257 | 403 | 549 | 791CIP2C_6 | 1820 | 1820 |
| 112 | 258 | 404 | 550 | 791CIP2C_7 | 2841 | 2841 |
| 113 | 259 | 405 | 551 | 791CIP2C_8 | 2904 | 2904 |
| 114 | 260 | 406 | 552 | 791CIP2C_9 | 3619 | 3619 |
| | | | | | 3620 | 3620 |
| | | | | | 3621 | 3621 |
| 115 | 261 | 407 | 553 | 791CIP2C_10 | 4069 | 4069 |
| 116 | 262 | 408 | 554 | 791CIP2C_11 | 4503 | 4503 |
| | | | | | 4504 | 4504 |
| 117 | 263 | 409 | 555 | 791CIP2C_12 | 5083 | 5083 |
| 118 | 264 | 410 | 556 | 791CIP2C_13 | 5202 | 5202 |
| 119 | 265 | 411 | 557 | 791CIP2C_14 | 5436 | 5436 |
| 120 | 266 | 412 | 558 | 791CIP2D_1 | 1410 | 1410 |
| 121 | 267 | 413 | 559 | 791CIP2D_2 | 2209 | 2209 |
| | | | | | 2210 | 2210 |
| 122 | 268 | 414 | 560 | 791CIP2D_3 | 2570 | 2570 |
| 123 | 269 | 415 | 561 | 791CIP2D_4 | 3083 | 3083 |
| | | | | | 791CIP2A_79 | 791CIP2A_79 |
| 124 | 270 | 416 | 562 | 791CIP2D_5 | 3638 | 3638 |
| | | | | | 3639 | 3639 |
| 125 | 271 | 417 | 563 | 791CIP2D_6 | 4616 | 4616 |
| 126 | 272 | 418 | 564 | 791CIP2D_7 | 5046 | 5046 |
| 127 | 273 | 419 | 565 | 791CIP2D_8 | 5048 | 5048 |
| 128 | 274 | 420 | 566 | 791CIP2D_9 | 5092 | 5092 |
| 129 | 275 | 421 | 567 | 791CIP2E_1 | 237 | 237 |
| 130 | 276 | 422 | 568 | 791CIP2E_2 | 387 | 387 |
| 131 | 277 | 423 | 569 | 791CIP2E_3 | 458 | 458 |
| 132 | 278 | 424 | 570 | 791CIP2E_4 | 1482 | 1482 |
| 133 | 279 | 425 | 571 | 791CIP2E_5 | 2368 | 2368 |
| 134 | 280 | 426 | 572 | 791CIP2E_6 | 2429 | 2429 |
| | | | | | 2430 | 2430 |
| | | | | | 2431 | 2431 |
| 135 | 281 | 427 | 573 | 791CIP2E_7 | 2483 | 2483 |
| | | | | | 2484 | 2484 |
| | | | | | 2485 | 2485 |
| 136 | 282 | 428 | 574 | 791CIP2E_8 | 2675 | 2675 |
| | | | | | 2676 | 2676 |
| 137 | 283 | 429 | 575 | 791CIP2E_9 | 2675 | 2675 |
| | | | | | 2676 | 2676 |
| 138 | 284 | 430 | 576 | 791CIP2E_10 | 2741 | 2741 |
| 139 | 285 | 431 | 577 | 791CIP2E_11 | 3058 | 3058 |
| 140 | 286 | 432 | 578 | 791CIP2E_12 | 4078 | 4078 |
| | | | | | 4079 | 4079 |
| 141 | 287 | 433 | 579 | 791CIP2E_13 | 4367 | 4367 |
| | | | | | 4368 | 4368 |
| | | | | | 4369 | 4369 |
| | | | | | 4370 | 4370 |
| | | | | | 4371 | 4371 |
| | | | | | 4372 | 4372 |
| 142 | 288 | 434 | 580 | 791CIP2E_14 | 4367 | 4367 |
| | | | | | 4368 | 4368 |
| | | | | | 4369 | 4369 |
| | | | | | 4370 | 4370 |
| | | | | | 4371 | 4371 |
| | | | | | 4372 | 4372 |
| 143 | 289 | 435 | 581 | 791CIP2E_15 | 5140 | 5140 |
| | | | | | 5141 | 5141 |
| 144 | 290 | 436 | 582 | 791CIP2E_16 | 5273 | 5273 |
| 145 | 291 | 437 | 583 | 791CIP2E_17 | 5299 | 5299 |
| 146 | 292 | 438 | 584 | 791CIP2E_18 | 5805 | 5805 |

[0418] TABLE 6

| | | | | |
|---|---|---|---|---|
| | | Predicted | | |
| | | beginning | Predicted end | |
| | | nucleotide | nucleotide | Amino acid sequence (A=Alanine C=Cysteine, |
| | | location | location | D=Aspartic Acid, E=Glutamic Acid, F=Phenylalanine, |
| | | corresponding | corresponding | G=Glycine, H=Histidine, I=Isoleucine, K=Lysine, |
| | | to first | to last | L=Leucine, M=Methionine, N=Asparagine, P=Proline, |
| | | amino acid | amino acid | Q=Glutamine, R=Arginine, S=Serine, T=Threonine, |
| SEQ | | residue of | residue of | V=Valine, W=Tryptophan, Y=Tyrosine, X=Unknown, |
| ID | Meth- | peptide | peptide | *=Stop codon, /=possible nucleotide deletion, |
| NO: | od | sequence | sequence | \=possible nucleotide insertion |

| | | | | |
|---|---|---|---|---|
| 439 | A | 289 | 699 | MKSSSS/SSSPSFQSKTTMGHPLVQTGLS |
| | | | | SS*PMSLCSSLLSSCRSWNPFPICYMLPL |
| | | | | GTGGHSVN\GSCLGISFGNSSLSRAPSCSP |
| | | | | TAASSSSSSSSSSSSSESTKTMTSSMFCIV |
| | | | | RIRAHLFKAMNSFAIALTI |
| 440 | A | 42 | 451 | DHRGRSRTNAHQKMTRSAGIPIVWFFQM |
| | | | | GNPPKAKTPLRCILENWDQFDPQMLRK |
| | | | | KLLIFFCSTAWPQYPLQGGETWPPKRSIN |
| | | | | YNSILQLDLFCRXEGKWSEVPYVQTFFS |
| | | | | LREHWQLYDKCDLCPTGSPQSLPP |
| 441 | A | 1297 | 1386 | STYLHTHIYVYICMCRYVYMYMYTHLH |
| | | | | TQA |
| 442 | A | 1093 | 1496 | SHHCTSAWATQRDPVSRKKKKRDKLPR |
| | | | | NPSLPHMEALANVNFPRKSFRP\RDAGK |
| | | | | RIWLSRGGFCVPAARPQTMDTGPSCSSP |
| | | | | GLQNFSPQRKENRACAC*QNAGPAPKNP |
| | | | | MCVRLKS/VGRPQGFQRKL\KETGLC |
| 443 | A | 9 | 519 | NSARGNRLRESGPWCSSPADKTKAQRPP |
| | | | | RLKLGATPGEYGGEPLERMFLSFPITPTK |
| | | | | TYFPKLRTLSQGSAPNGSAPG/VKGHGQ |
| | | | | ERWPNALEPKAVAATWNEHAPNGAVR |
| | | | | P*SDLARRHKL\RV\DPVQFSKVPKGHCL |
| | | | | AWVDPGAVHLPRLEFQPLSVARLPLGQ |
| | | | | VSWVSC |
| 444 | A | 4 | 452 | SSAEEFAGAAGPRAAGCGLAPAADQKP |
| | | | | DHRLSLGTHLVGTAAAELGWPLGLRGH |
| | | | | GEHGGEVPEAYPPTSMSRSPPIWLVICGP |
| | | | | GNNGGDGLVCARHLILFGYEPTIYYPRR |
| | | | | PNKPLFTALVTQCQKMDIPFLGEMYAQP |
| | | | | MTIDELYELV |
| 445 | A | 1567 | 1887 | FKQICLFLLLFFEMESCSVT\RLECSGTIS |
| | | | | AHCNLHLPGSSDSPASASPVTGITGTCHH |
| | | | | AQLTFLYFYYMTGFRHVAQVGvELLG\* |
| 446 | A | 2 | 1214 | ALCEPQPFQGSGCVIAILGRKMFSSVAH\ |
| | | | | LARANPFNTPH\LQLVHDGLGDLRSSSPG |
| | | | | PTGKPRRP\RSI\LAAAAVEEQYSCDYGSG |
| | | | | RFFILCGLGGIISCGTTHT\ALVPLD\LVKC |
| | | | | RMKV\DPQKYKG\IFNG/FSQVTLKEDGV |
| | | | | \RGLAKGLAPTF\LGYSMQGLCKFGFYE |
| | | | | VFKWLYRHMLGEENTYLWRTSL\YLAA |
| | | | | YARAEFFADLALA\PMEAAKVRIQTQP\G |
| | | | | YA\NTLRGCSSPKCIKEEGLTSILTRGVLP |
| | | | | LWMRQIPYTMN*SSPCLERTV\EA\LYKF |
| | | | | VVP*APAVKCSK\PEQLGCNHLVAGY\IA |
| | | | | RVFCANCFSPRADSVVSGVE*RKKVASA |
| | | | | FSGPSKRLGI*KV*WKGLFARII\MIGT\LT |
| | | | | AL\QWFIY\DSVKVYFR\LPRPPPP\EMQES |
| | | | | \LKKKLGVNSSS |
| 447 | A | 1 | 288 | GTRWFCLLRPLFALSVHFLQRAGMAH |
| | | | | KQIYYSDKYFDEHYEYRHVMLPRELSK |
| | | | | QVPKTHLMSEEEWRRLGVQQSLGWVH |
| 448 | A | 74 | 1003 | RRSLSAFCSRLAAPPLRSSRGSSRCGSAL |
| | | | | ALALLALRPGPGPGPAPAMEKTELIQK\A |
| | | | | KLADARRSVYDDMAT\CMKAVTEQGA\ |
| | | | | ELSNEERNLLS\VAYKNVVGGRJKSRLGR |
| | | | | VI\SSIEQK\TDTSDKKLQLIKDYREKVES |
| | | | | ELR\SI\CTTVL\ELLDK\YLIANA\TNPESK\ |
| | | | | VFYL\KMTKG*FTFR\YLCLEVACC\DDRK\ |
| | | | | QTIDN\SQGAYQGGILILRQERRLQPTHPI |
| | | | | \RLGGLLFNF\SVFYYEI\LNNPEACLHAW |
| | | | | LKTAF*WRAIA*LDTLNE\DSYKDST\LIM |
| | | | | QLLRDNPTFFL/WTSDSAGEECDAAEGAE |
| | | | | N |
| 449 | A | 1 | 912 | METSVIEGGLNITLTIRLLMHGKEVGSSIG |
| | | | | KKGESVKKMREESGAPINISEGNCPERII |
| | | | | TFAGPANAVFKGFAMIIDKLEEDISSSMT |
| | | | | SSTAASRPPVThRLVVPASQCGsLIGKGG |
| | | | | CKJKEIRESTGAQAITIAGIPQSIIECVKQI |
| | | | | CVVMLESPPKGVTIPYQLKPSSSPVIFAG |
| | | | | GQAYTLQGQFAIPQPDLTMLHQLAMQQ |
| | | | | SHFPMTHGNTGFSAGLDTSAQTTSHELTI |
| | | | | PNDLIGCIIGRQGAKINEIRQMSGAQIKIA |
| | | | | NPVEGSTDRQVTITGSAASISLAQYLTNV |
| | | | | RLSSETGGMGSS |
| 450 | A | 101 | 802 | RIPCARWAKLCKVSSFAPDWTPMFALCP |
| | | | | SSPPGLAEATYLKSQENSCLPGALPGTR |
| | | | | AQGVGAAPERGSHSPPCRMTVHNLYLF |
| | | | | DRNGVCLHYSEWHREEASRGSPKEEEY |
| | | | | KADVRGWLFSIRSFVSKMSPLDMKDGL |
| | | | | PGPSKLSRYKLHYYGDAHWGSKYVMN |
| | | | | Y*L*ALGPIPRLLLHQHLTSALVCGSLVV |
| | | | | KESPLVPLGPKTV\QSEAIFGSRTWTPYV |
| | | | | R\SLPFLSPAQGWA |
| 451 | A | 1 | 189 | QVIQQGRQSKGVTQKDLATKINEKYQVI |
| | | | | ADYESGRAIPNNQVLGKIERAIDVGTRS |
| | | | | ARVLRAQ |
| 452 | A | 105 | 449 | VESNTGRKWTEAAGTGDIQCLAWGSSG |
| | | | | DGRGGDPRGRVPAAALGAAVVAAMAS |
| | | | | PDPWAPGPKQPGRWADLAAILLCGLRP |
| | | | | A*PPYSPASPHLAPKRSHIRASDLLETRQG |
| | | | | AEGRAR |
| 453 | A | 3 | 274 | FFASLLESPVSPRLAMDPNCSCAAGVSC |
| | | | | TCAGSCKCKECKCTSCKKSECEAISMV |
| | | | | WGCG*GCCSCCP/AAASKCAQGCVCKG |
| | | | | ASEKCSCCD |
| 454 | A | 386 | 787 | NSIMEEIQELNEVARHRPRST\LV\MGIQQ |
| | | | | ENRQIRELQQENKELRTSL\EEHQSGL/EE |
| | | | | LIMSKYREQM\LRLLMASKK\DDPGMIIK |
| | | | | LK\EQHSYD*HWYIVTSPKDSSLMHLDT |
| | | | | SLKHLNMDWREGTWKQIRMYTK |
| 455 | A | 70 | 500 | RAGAKCNPGSHGCFGAQDSKMAEQLSP |
| | | | | GKAVDQVCTFLFKKPGRKGAAGRRKRP |
| | | | | ACDPEPGESGSSSDEGCTVVRPEKKRVT |
| | | | | HNPMIQKTRDSGKQKAAYGDLSSEEEEE |
| | | | | NEPESLGVVYKSTRSAKPVGPEDMGAT |
| | | | | AEGQGG |
| 456 | C | 22 | 282 | MSEGPSVRSEEAICLYYEELGGGARQTH |
| | | | | VRRPLSECSPGDWSHSGVAEGPXCIQFL |
| | | | | HITSHGAKEALSTWLGLLTSGPATTAAV |
| | | | | LP* |
| 457 | A | 2 | 1054 | ICSASSGRCRARHRVLARRSQNTRSLPPP |
| | | | | SLSPASRSPRPTPAAThRDSLSGGLCSST |
| | | | | AGLIRGTASMDLQGRGVPSIDRLRVLLM |
| | | | | LFHTMAQIMAEQEVENLSGLSTNPEKDI |
| | | | | FVVRENGTTCLMAEFAAKFIVPYDVWA |
| | | | | SNYVDLITEQADIALTRGAEVKGRCGHS |
| | | | | QSELQVFWVDRAYALKMLFVKESHNM |
| | | | | SKGPE\ATLES*AKVQFVY\DSS\EKTHFQ |
| | | | | RRISCSGKPTANLHIILSAIVTPAGKSYE |
| | | | | CQAQQTISLASSDPQKTVTMILSAVHIIQP |
| | | | | FDHSDFVFSEEHKCPVDEREQLEETLPLI |
| | | | | LGLILGLVIMVTLAIYHVHHKMTANQV |
| | | | | QIPRDRSQYKHMG |
| 458 | A | 3 | 379 | KDQTILENKQQYDIEITRIKIELEEALVNV |
| | | | | KSSQFKLETAEKENQILGITLRQRDAEVT |
| | | | | RLKELTRLFKTVDLNYLQSLTQKPNTVH |
| | | | | ELRKSRTALNKEEVGDLSPGPSTHFNFS |
| | | | | HLLGIWGSAA |
| 459 | A | 460 | 549 | GGRPEFLVSSQK1SIWGLECQSQYFL*AH |
| | | | | RR*VFGDWNVNLNTSFLGK |
| 460 | B | 1 | 1590 | MQLLLAECMGQSGPPGAVCHCQRVWQ |
| | | | | AEAVRRSKRPVPSTTQGLKSVGAWRGS |
| | | | | GRQLHLQPQYRIHWVKPAGLLSLVGTM |
| | | | | ENICVWPSDCKYTNRIISVSSSRLLDSLK |
| | | | | RDYAGKPQPPIKSERRINPPSYAMAAAQL |
| | | | | RDSEETGGSEFVFAEKTLRKCVKCPQVE |
| | | | | LENVAFAKDAEESRDAQRLGHWWPCIM |
| | | | | EThSNASGTFAIRLLKILCQDNPSHNVPC |
| | | | | SPVSISSALAMVLLGAKGNTATQMAQA |
| | | | | LSLNTEEDIHRAFQSLLMVNKAGTQYL |
| | | | | LRTANRLFGEKTCQFLSTFKESCLQFYH |
| | | | | AELKELSFIRAAEESRKINTWVSKKTE |
| | | | | GQRRLLQDGAALPPRKTPNPLTPQRGEK |
| | | | | KEQFMLKKEKYKRTEELKVKFYRDNQG |
| | | | | HLKGDRLCDHWKLRRAVDLAYMHIDED |
| | | | | DTGNCTLQVEVAKYQRNGKYEASGRKC |
| | | | | ANHRKAPSLRQKRPRRSPSKRRDTLSELS |
| | | | | SSNTFHPVDFEDGQRRPSRRVKFGPTRR |
| | | | | LIVFDRHPAGEPVSWRNAGAAAHCIQTF |
| | | | | DGRWFE* |
| 461 | A | 2 | 295 | VLLMDALVEDDICILNHETAHKRDTVTP |
| | | | | VSIYSGDESVASHFALVTAYEDIKKRLK |
| | | | | DSEKENSLLKKRIRFLEEKVIFIFYLHCVC |
| | | | | DIRNNSKYLKF |
| 462 | A | 1 | 680 | GTREQLRHTEHQLPPALKMFHQIWAAL |
| | | | | LYFYGIILNSIYQCPEHS\QLTTLG\VDGK |
| | | | | EFPEVHLGQWYFIAGAAPT\KERLATF*T |
| | | | | LLDMVFQNMGCWLLPPIAASNLSVLPIR |
| | | | | M*VGKMGLLCAPGKWDLTHL\TEGGGT |
| | | | | DLQET*RGRP\DM\KTEALFPAS\CPRVGI |
| | | | | MLK*EQAQG\YQRFLLYNRSP\HPPEKCV |
| | | | | EEFKSLTSC\LD\SKAFL\LTPR\NQEACEL |
| | | | | SNN |
| 463 | A | 3 | 406 | SSMASALSYVSKFKSFVILFVTPLLLLPL |
| | | | | VILMPAKILDSRQVCVQYMKDTNMLFL |
| | | | | GGLIVAVAVERWNLHKRIALRTLLWVG |
| | | | | AKPARLMLGFMGVTALLSMWISNTATT |
| | | | | AMMVPIVEAILQQMEATSAATEAG |
| 464 | A | 1 | 249 | PEDAPLENVECDNMNRFDRPDRNVRQP |
| | | | | QEGFWKRPPQRWSGQEHYWLSHPDHYH |
| | | | | KHGKSDLSSLKYYSLPAAFPDPQTFPRE |
| | | | | N |
| 465 | A | 235 | 885 | VVRRSGFLFCLFVLFLSSMNSASVDGHL |
| | | | | SGCRLFLFLSPLFRFYCDYCDTIYLSPHD |
| | | | | SPSVRQT\HCSGK\KHIENVKDYYQK\W |
| | | | | MEK\QSQSLI\DKTNGLHFQQGK\NPPN\P |
| | | | | FSAPSFLPGA/G*YQPSPPSLRG\PPRP\GM |
| | | | | NAQAPPYWGGPSHGWPMJGJPPPSSWGL |
| | | | | IAQWGPASGELRP\PMG\GHYCQLIAWG |
| | | | | PPMDVGPSCPFH*WCPLGPGMT\RPDR |
| 466 | A | 24 | 364 | PTEY/ENLIFPCIKEAFIVVEEWVKETLAV |
| | | | | L/WPAKQYPFVTPIEERILMEEGKAFPPS |
| | | | | RSTAKQKLDONPVSPTPV\IGLSPTPNKE |
| | | | | EKRLNLCPFEPTGHLDGARDTAGPSWL |
| | | | | HHRF |
| 467 | A | 60 | 401 | FLLLGLVSISGSRIQEDGRGRCGPQSLHL |
| | | | | EETPEGRQPEGRSHPRLLPAPRPAHAHA |
| | | | | HRESAGCAGGHGKWGGAHTAGGKEVS |
| | | | | GGERRKRRDQQRRGGTRSEVLLVSEDG |
| | | | | KILA |
| 468 | C | 316 | 381 | MRMWPACCLILPRTGCTCCSLV* |
| 469 | A | 247 | 969 | ALSTLAGDMPRGRK\SRRRRNARAA*EN |
| | | | | RNNRKIQASEASETSMAGSVVTSTPRRT |
| | | | | TLSGPEE\DPSTPEEGLLPPLKEASSTAQA |
| | | | | QKPFSCRRSNFSGAPRKVFL\MSIL\ALIFI |
| | | | | MG\NSAKEALVWKVLGKLGMQPGRQH |
| | | | | SIFGDPKKIVFEEF\VRRGYLIYKPV\PRSS |
| | | | | PVEYEFFWGAPSTRGNSSKLKVHAFLW |
| | | | | ARVS*TDCS\KDWPCNyDWDSDDDA\EV |
| | | | | EAIL\NSGA\RGYSAPLK |
| 470 | A | 2 | 412 | VGGAGGQSAAAAARRCSEGEWASGGV |
| | | | | RSFSRAAAAMAPTKTRLPGFVEQAEALK |
| | | | | AKGVQVVACLSVNDAFVTGEWGRAHK |
| | | | | AEGKVRLLADPTGAFGKETDLLLDDSLV |
| | | | | SIFGNRRLKRFSMVVQDGIYKAINVEPD |
| | | | | G |
| 471 | A | 1 | 250 | AVASAMAAASGSVLQRCIVSPAGRHSAS |
| | | | | LIFLHGSGDSGQGLRMWIKQVLNQDLTF |
| | | | | QHIKIIYPTAPPRYAVIYLTCQYNSVA |
| 472 | A | 257 | 479 | WPFFLPLKLFKFQVILFLDVIYILNFYLYR |
| | | | | YFLASFYTKYDPTHFILNTASLLSVLIPK |
| | | | | MPQLHGVRIFGINKY |
| 473 | A | 141 | 719 | ISWVCLNCQSQHLLKAPLSSSGHSGRIM |
| | | | | VBTHGKN\ETADYKRLQTFPLVMIISDM |
| | | | | PQEMRAETMELCV\TACEKFFQQQTESA |
| | | | | RQDCSKETMDKKF\GSSW\HVVIGEGFG |
| | | | | F*IEITHEVERTSSTLYFGGTLAVCVWKL |
| | | | | LLDTLSPAPSPAGPFPATRLGWGAALGR |
| | | | | SWFFQGELGSFLFVFVYQFPEPRPVCET |
| 474 | A | 2 | 239 | RKTQTTRRGPGLWAGPGG*RGGWWSR |
| | | | | RLLLAAGFLGTHPGSTHPGLQQPRFKWD |
| | | | | HTRSSQGAFIFTFFPRGGQEHSFTS |
| 475 | A | 900 | 1108 | HRFWASSPHRRICRSYCAASSSLMPPPAS |
| | | | | SFSTMAPALPASAPVPLKPTARRTRAPPT |
| | | | | AAGSTPGVLLR |
| 476 | A | 1733 | 2035 | QKTSRTFLAALCTVCPRRHICLDPCF*RR |
| | | | | ELWGLPAPAPPPREPTVPPPLSPGPMGPG |
| | | | | SGCVPCLRXLCLLPQMRPVPERLPVQPG |
| | | | | SVWPQTGIQNPKKKKK |
| 477 | A | 250 | 381 | SGVLAHGQAEAEVETSCLFITGMRMWP |
| | | | | ACCLILPRTGCTCCSLV |
| 478 | A | 509 | 932 | CLPLCSTAFVSKQEGSEVVKRPRRYLYQ |
| | | | | WLG*EKRQSWAKALPLRIXILWGSCSRE |
| | | | | WPLWVVVGVQAACPGGHPGAPCVGRG |
| | | | | GMGILHGG*CHHVGCLRAP\VPYPDPLE |
| | | | | PRREVCELNPDCNELADHIGFQEAYRRF |
| | | | | YGPV |
| 479 | B | 93 | 366 | XTSVVRPFAKLVRPPVQVYGIEGRYATA |
| | | | | LYSVLNPYVKRSIKVKSLNDITAKERFSP |
| | | | | LTTNLINLLAENGRLSNTQGVVSAFSTM |
| | | | | MSVHRGE* |
| 480 | A | 1 | 507 | MSMLRLQKRLASSVLRCGKKKVWLDP |
| | | | | NKTNEIANANSHQQIWKLIKDGLIIRKPV |
| | | | | TVHSRARCQKNTLAHWKGRHIGIDKRY |
| | | | | CESKKIDRHMYHSLYLKVQGNVFTNKPI |
| | | | | LMEHSHKLKADKAHKKLLADQAEARRP |
| | | | | KTKEARKRSEERLQAKKEEIIKTLFKEED |
| | | | | TKK |
| 481 | A | 106 | 450 | NFLKDGVLLCLPGWIEYSGMILAHcNLR |
| | | | | LLGSNNSP\SAS*IAGATGACILHAWLIF* |
| | | | | NFS*RWGLLGVESPSLGLLFLFILKKNYY |
| | | | | VLY |
| 482 | A | 59 | 403 | ILVLIKVHACGVNPVETYIRSGTYSRKPL |
| | | | | LPYTPGSDVAGVIEAVGDNASAFKKGD |
| | | | | RVFTSSTISGGYAEYALAADHTVYKLPE |
| | | | | KLDFKQGAAIGIPYFTAYRALIHSACVK |
| | | | | AGE |
| 483 | A | 52 | 415 | LYDNRTLTKGPDTVGTMGQCRSANAED |
| | | | | AQEFSDVERAIETLIKNFHQYSVEGGKET |
| | | | | LTPSELRDLVTQ\QLPHLMIPSNCGLEEKI |
| | | | | ANLGSCNDSKLEFRSIWELIGEAAKSVK |
| | | | | LERPVRGH |
| 484 | A | 1 | 284 | AAAHIHPQRAFPDPLGGGNRPWVPGTR |
| | | | | CRAPPKGGWEGSHTAGKLKTVACSEFPS |
| | | | | STFLTSFPWWCGPCSALGPPFPAKPGLG |
| | | | | KWSEVPLCVSL |
| 485 | A | 280 | 420 | QVESSPQPGLPAGEQLEGLKIIAQDSDPR |
| | | | | SPTLGIARTPMKTSSGGKR |
| 486 | A | 2 | 341 | LEAIISEMGSTEILEKETPENLSNGTSSNV |
| | | | | EAAKRLAKRLYQLDRFKRSDVAIKITHLGK |
| | | | | NNEFSKLVAEEYLKFFDFTGMTL\ISHSE |
| | | | | SRSVTQAGVQ*HHLGSLQPPPSRFKQFS |
| 487 | A | 1 | 396 | RPVIPGSTISWALRGAAIKMAASRWARK |
| | | | | AVYLLCASDLLLLLLLLPPPGSCAAEGSP |
| | | | | GTPDESTPPPRKKKKDIRDYNDADMARL |
| | | | | LEQWEVRGARTPSRLFSVRDPVAYDPLP |
| | | | | VLSWDLSDPLTSSTHALNPY |
| 488 | A | 2 | 281 | FVRAGFLPGFGRVSPCCSWVVETLAKM |
| | | | | ACAAARSPADQDRFICYPAYLNNKKTI |
| | | | | AEGRRIPISKAVENPTATEIQDVCSADGL |
| | | | | NVFLEVKNV |
| 489 | A | 1 | 235 | MLTELVPTQAEPADLELLQELNRTCRA |
| | | | | MQQRVLELIPQIANEQLTEELLIVNDNLN |
| | | | | NVFLRHIERFERFRTGPMALAGH |
| 490 | A | 2 | 238 | PKRSVLSKSVPGYKPKVIPNAICGICLKG |
| | | | | KESNKKGKAESLIHCSQCENSGRWICDC |
| | | | | CQRAPPTPRKVGRRGKNSKEG |
| 491 | A | 1691 | 1942 | AEGKKLGLVGWVQNT\DRGTVQGQL\Q |
| | | | | GPIS\KVRHM\QEWPETREAYQKPPKT/H |
| | | | | RTIANFNNEKVILKLGLPQTFQIVKIMGL |
| | | | | EF |
| 492 | A | 66 | 245 | SNLFSLSLFHLKGFFCFFFLDF*MESRSV |
| | | | | ARLECSGTILAYCNLCLPGSSDSPASASH |
| | | | | L |
| 493 | A | 1 | 1653 | IVIIADDKPAAMAGESAGQSSESGVGANF |
| | | | | FGITFQTTETLMSTGHLNGAECKAGPGT |
| | | | | VKTLAVEEEASRLWRKPDPYNTRREPDL |
| | | | | RGGALDATGAQGGPLDRARKEPETACS |
| | | | | IIRRKSVAGQTPVGSNKKRNRVPGHVPA |
| | | | | AGLTSAAATKERAQCSDTGGLDPYSAG |
| | | | | HFSRATLLFCPPHTHIRCISLTKSEKSERQ |
| | | | | QLFLPKPQSAVFGSEGRRTLRKLRRLSSP |
| | | | | GAMDSDASL\VSSRISSPEPDDLFLPARS |
| | | | | KGSSGSA\F\TGGTVSSSTPSDCAPELS\AE |
| | | | | LRAAMGSA\GAHSGTKLGGSGFKSSSSS |
| | | | | TSSSTSSSAASSSKKVKKRMTEPELQQLR |
| | | | | LKISSRERKRMHDLNIAMDGLREVMPY |
| | | | | AHGPSVRKLSKIATLL\LARNYISMLTTS |
| | | | | LEEMKRLVSEIYGGIHTPAGFHPSACGGL |
| | | | | AHSAPLPAATAHPAAAAHAAHHPAVHH |
| | | | | PILPPAAAAAAAAAAAAAVSSASLPGSG |
| | | | | LPSVGSIRPPHGLLKSPSAAAAAPLGGGG |
| | | | | GGSGASGGFQHWGGMPCPCSMCQVPPP |
| | | | | HHHVSAMGAGSLPRLTSDAK |
| 494 | A | 253 | 414 | VRSLVISMTCKTAVSFLTSRVCSNRHGLI |
| | | | | RKYGLNMCRQCFRQYAKDIGFIKLD |
| 495 | A | 34 | 219 | AMAYQLYRNTTLGNSLQESLDELIQ\SG |
| | | | | RLN*KSNIFILMGLQ*FLSYHLGKEI*GKI |
| | | | | SWTI |
| 496 | A | 3 | 424 | DFWREMMRASWLVRQDSRHQRIRLPHI |
| | | | | EAIVSGRGP*TKITDKKCSRQQ\VGANPT |
| | | | | SIDSVVIGKDQEVKLQPGQVLHMANELY |
| | | | | PYIV*REEEAKNPGLETHRKRKRSRNSDS |
| | | | | IERDAAHEAEAGTGLEPGSNSGQCSVPL |
| 497 | A | 2 | 405 | TLVPASWSSKEANQPKMIPGGLS\EAKP |
| | | | | ATPEI\QEIVDKVKPQLEEK\TNETYGKLE |
| | | | | AVQYKTQVVAGTNYY\IKVRAGDNKYM |
| | | | | HLKVFK\SLPGQNEDLVLTGYQVDKNK\ |
| | | | | DDELTGLLAACTQSVLISFNWLLES |
| 498 | A | 125 | 307 | QGRRKMBQPGAAASGAGGGSEEPGGGR |
| | | | | SNKRSAGNRAANEEETKNKLPKLRDRITS |
| | | | | FRKSTV |
| 499 | A | 1 | 1602 | MWESLELPRDLLNGFDQKPDSNMDNNV |
| | | | | QAEVYSDGEEELVGNWRSPHXLRECLP |
| | | | | LIIFLRNRLKYALTGDEVKICMQGFIKVD |
| | | | | GKVRTDITYPAGFMDVISIDKTGDNFHLI |
| | | | | YDTKGRFAVHRITPEEAKYKLGKVRKIF |
| | | | | VGTKGIPHLVTHDAHSIRYLDPLIKEQAP |
| | | | | GPARNWGNASSFPRSDGKPTVLSLRAAT |
| | | | | TGSTGLDLLCLNKLMLKEGEDPKRVAT |
| | | | | GIWGLLPPGTVGLVLGWSSLSSKGTNVL |
| | | | | TVVIDSDYIIREILVMMDCKGLHILPPGS |
| | | | | KIAQLLILSYWVPSLYGKERGKGSFGST |
| | | | | GATGVYWNQLITDQGPMIKKLEIRILLAY |
| | | | | WAQGQTFQSLVIKTGQKIGFGYLTPAA |
| | | | | KREIEEIEQAVSQGQLDRIDPRYSIQLFYL |
| | | | | SHQTLPYRVNRTDGPRAMLPRMGFLPH |
| | | | | TGTKTLSPYSQLLTKVIYSGHKQCNQSL |
| | | | | GYDPDVIRIPLSKKQFKAVLPVSINLQIAF |
| | | | | SDYTGQIEHILPADKLLYFLSHTLVILPTK |
| | | | | IVHSPIPNALTLFTDGSGKHGKAAVW |
| 500 | A | 1 | 278 | LASGGVAYQAIQALKNMGEILKAAGCD |
| | | | | LSNVGTTTVLLGDINDFNTANEIYRQYL |
| | | | | KSNFPARAAYQDAALPQGIRJEIEAVAM |
| | | | | QGPLTTALL |
| 501 | A | 17 | 385 | TSAWRTAFWSTWPTSPPYKGWWWENA |
| | | | | IAALFRRHIPVSWLIRATLSESENFEAAV |
| | | | | GKLAKTPLIADVYYLVGGTSPREGVVITR |
| | | | | NRDGPADIWPLDPLNGAWERVETNYDH |
| | | | | WKPAPKEDDRRT |
| 502 | A | 23 | 356 | LVAAWAPLWGGAAGLFTGSLNTQAYST |
| | | | | MASRGGGRGRGRGQLTFNVEAVGIGKG |
| | | | | DALPPPTLQPSPLFPIGGVYPGS*RSECGS |
| | | | | YRRNGLQFCSPRGPLRPQKIRRKQYRN |
| 503 | A | 144 | 271 | VCSDLSLSPSSPGCCSCCPVGCAKCAQG |
| | | | | CICKGTSDKCSCCA |
| 504 | A | 1 | 1311 | MWLWEDQGGLLGPFSFLLLVLLLVTRSP |
| | | | | VNACLLTGSLFVLLRVFSFEPVPSCRALQ |
| | | | | VLKPRDRISAIAHRGGSHDAPENTLAAIR |
| | | | | QGSPIFSGRPSHFLIRPQGTLPALDRSQCL |
| | | | | GISGLEVLYLQKTADMYIVSVRLTLRLH |
| | | | | TARNKAAKNGATGVELDIEFTSDGIPVL |
| | | | | MHDNTVDRTTDGTGRLCDLTFEQIRKL |
| | | | | NPAANHRLRNDFPDEKIPTLREAVAECL |
| | | | | NHNLTIFFDVKGHAHKATEALKIKMYME |
| | | | | FPQLYNNSVVCSFLPEVIYKMRQTDRDV |
| | | | | ITALTHRPWSLSHTGDGKPRYDTFWKHF |
| | | | | IFVMMDILLDWSMHNTLWYLCGISAFLM |
| | | | | QKDFVSPAYLKKWSAKGIQVVGWTVNT |
| | | | | FDEKSYYESHLGSSYITDSMLTASHLSTP |
| | | | | SVAFVQAHSLAMASLLHPCRGLLASHL |
| | | | | QQLDSDFRRPPVPIAM |
| 505 | A | 1 | 1461 | MAPAPPPAASFSPSEVQRRLAAGACWV |
| | | | | RRGARLYDLSSFVRHHPGGEQLLRARA |
| | | | | GQDISADLDGPPHRHSATARRWLEQYY |
| | | | | VGELRGEQQTGDKHPMRSETHHITETAL |
| | | | | AGVTRTFAFLHPVGSMENEPVALEETQK |
| | | | | TDPAMEPRFKVVDWDKNTASGCLTPPA |
| | | | | EDWLSIHRDTLILTPIVCGRLGPTSITDEG |
| | | | | TEGLREEKMHVQDLTAGQRHSQALMDL |
| | | | | VDWRKPLLWQVGHLGEKYDEWVHQPV |
| | | | | TRPIRLFHSDLIEGLSKTVWYSVPIIWVPL |
| | | | | VLYLSWSYYRTFAQGNVRLFTSFTTEYT |
| | | | | VAVPKSMFPGLFMLGTFLWSLIEYLIHRF |
| | | | | LFHMKPPSDSYYLIMLHFVMHGQHHKA |
| | | | | PFDGSRLVFPPVPASLVIGVFYLCMQLIL |
| | | | | PEAVGGTVFAGGLLGYVLYDMTHYYLH |
| | | | | FGSPHKGSYLYSLKAHHVKHHFAHQKS |
| | | | | GGSHPLGGQVALGDPLLPGASLPRAQPT |
| | | | | GLLQAVATGSSRKGK |
| 506 | A | 2 | 629 | FVAPSRARGAAGAGARMLEVHIPSVGPE |
| | | | | AEGPRQSPEKSHMVFRVEVLCSGRRHTV |
| | | | | PRRYSEFHALHKRIKKLYKVPDFPSKRLP |
| | | | | NWRTRGLEQRRQGLEAYIQGILYLNQEV |
| | | | | PKELLEFLRLRHFPTDPKASNWGTLREF |
| | | | | LPGDSSSQQHQRPVLSFHVDPYVCNPSP |
| | | | | ESLPNVVVNGVLQGLYSFSISPDKAQPK |
| | | | | AACRPAPLPPMP |
| 507 | C | 67 | 207 | MQSTSTHRLAESRALALGVAQIVLCELG |
| | | | | PGLWGGGAAGPLLKTLAQ* |
| 508 | A | 412 | 440 | RNRCTLCTQHLCERKEIMPLGIKPFTRPL |
| | | | | ALRRPRGSPLAAPLRV*CQGALFLFSHT |
| | | | | GAVYTMYSDYVKRMAQDAGEK |
| 509 | A | 1 | 392 | KVHMNGLRYALYIMGPALTRG\STRCLL |
| | | | | \SMLRSNRTDLDLMMKEAYFGEVDIMD |
| | | | | DLPT\GNISANVTGRLYKCGVTNHTVDLR |
| | | | | RMKT/EKWQNNLLPSRQFGFUVKTTSAGI |
| | | | | MDHEEARRKHTGGKILGFFF |
| 510 | A | 1 | 411 | ASTIRRRCFHSVISTEHRGLTMEFGLSWV |
| | | | | FLVALLRGGQCHEQLVBSGGGVVQPGR |
| | | | | SLRLSCVAPKFMLFSDSSSSSSSSSSSSSSSS |
| | | | | SSSSSSSSPDKHYADSVKGRFTISRDNSK |
| | | | | NTLYLQMNSLSAEDTAVYYCA |
| 511 | A | 1 | 1498 | FRARRQGRLGDPVRRCGTPRTGAACWR |
| | | | | SAANRGVLLSGLIGVVSWKRYLSLVITFF |
| | | | | MLLSAVCVMLNLAGSILSCQNAQLVNS |
| | | | | LEGCQLIKJFDSVEVCVCCELQHQSSGCS |
| | | | | NLGETLKLNPLQENCNAVRLThKDLLFS |
| | | | | VCALNVLSTIYCALATAMCCMQMVSSD |
| | | | | VLQMFLPQRSHPANPTCVTPHGTVLHQT |
| | | | | LDFDEFIPPLPPPPYYPPEYTCTPSTEAQR |
| | | | | GLHLDFAPSPFGTLYDVAINSPGLLYPAE |
| | | | | LPPPYEAVVGQPPASQVTSIGQQVAESSS |
| | | | | GDPNTSAGFSTPVPADSTSLLVSEGTATP |
| | | | | GSSPSPDGPVGAPAPSEPALPPGRVSPED |
| | | | | PGMGSQVQPGPGHYSRSTSDPTLCTSSM |
| | | | | AGDASSHRPSCSQDLEAGLSEAVPGSAS |
| | | | | MSRSATAACRAQLSPAGDPDTWKTDQR |
| | | | | PTPEPFPATSKRPRSLVDSKAYADARV |
| | | | | LVAXFLEHSHCALPTEAQHMVGAMRLA |
| | | | | VTNIEERLEEEAVFGADVLDQV |
| 512 | A | 2 | 226 | LQAITMSTDTGVSLPSYEEDQGSKLIRKA |
| | | | | KEAPFVPVVFGDSPALSPRLECSGRISAH |
| | | | | CSLCLLGSSDSPTSAS |
| 513 | A | 1 | 416 | EYVTVRRINLEACSNEMVTFLQGELHVS |
| | | | | KLFNHPNIVPYRATFIADNELWVVTSFM |
| | | | | AYGSAKDLICTHFMDGMNELAIAYILQG |
| | | | | VLKALDYIHHMGYVHRSVKASHILISVD |
| | | | | GKVYLSGLRSNLSCPGAFSKGHQCLA |
| 514 | A | 1 | 1263 | MPPGVFSGLTLLRLNLRSNHFTSLPVSG |
| | | | | VLDQLKSLIQIDLHDNPWDCTCDIVGMK |
| | | | | LWVEQLKVGVLVDEVICKAPKKFAETD |
| | | | | MRSIKSELLCPDYSDVVVSTPTPSSIQVP |
| | | | | ARTSAVTPAVRPNSTGAPASLGAGGGAS |
| | | | | SVPLSVLILSLLLVFIMSVFVAAGLFVLK |
| | | | | PIDYYGEICDNACLCEEK/VRHFNCEL*K |
| | | | | PGDHQSL*N*PSPFPNLPPL/RCPETF*TVS |
| | | | | IPMSLS/HYTGASILHLGSNVIQDIETGAF |
| | | | | HGLRGLRRLHLNNNKLELL/QR*YLPWL |
| | | | | GEPPVPTGRLQLHQRH*TQCFWETAFVA |
| | | | | GAYP/RMTIFCPVYPTIFSVLCPYCTWTS |
| | | | | RGTG*NFCPTWGSCSTGVL*SRTKQGIQ/ |
| | | | | RPHFRDSRLREPVLYSPPSAVFVEPNRNE |
| | | | | YLELKAKLNVEPDYLEVLEKQTTFSQF |
| 515 | A | 4 | 520 | GSVTPAIRSLALLAAILLVALQARAEPLQ |
| | | | | RAPLQVSGKSSPVCARLLLLQETRDRGL |
| | | | | LFALPLHSAYLEDLLRQSHFRQELMKLQ |
| | | | | PRSSLEQMIRKWLMPLHGMKVPLFRFQP |
| | | | | DKIIVLSTLIPTGDYSPHNLKNLFMRMVT |
| | | | | PSP |
| 516 | A | 209 | 453 | AHVDTMSKAIIPPELKKFIDKKLSLKLNG |
| | | | | GRHVQGILWGFDPLMNLVIDKCVEMAT |
| | | | | SGQQKNIGMVVIRRNSIIMLETLEQE |
| 517 | A | 1179 | 1544 | GFINQPLWIVEEWPWQPQKKEFFSLSQG |
| | | | | CFFVFFSFLFCFHFIGKISNGTGTAPVQA |
| | | | | GSLPQNCDGIWGPTTLSLFNQFLFRHPPLQ |
| | | | | QHFHEVGSETLAANTRFFSDLFWAFGSK |
| | | | | PQALVFV |
| 518 | A | 171 | 340 | NNFLEMRSLLPRLECSGVIAAIICSLELLG |
| | | | | SSDPPASASQSVGTTGVSHGTCLHQYS |
| 519 | A | 34 | 823 | HSMIETYNQTSPRSAATGLPISMKIFMYL |
| | | | | LTVFLITQMIGSALFAVYLHRRLDKIEDE |
| | | | | RNLHEDFVFMKTIQRCNTGERSLSLLNC |
| | | | | EEIKSQFEGFVKDIMLNKEETKKENSFE |
| | | | | MQKGDQNPQIAAHVISEASSKTTSVLQW |
| | | | | AEKGYYTMSNNLVTLENGKQLTVKRQG |
| | | | | LYYIYAQVTFCSNREASSQAPFIASLCLK |
| | | | | SPGRFERILLRAANTHSSAKPCGQQSIHL |
| | | | | GGVFELQPGASVFVNVTDPSQVSHGTGF |
| | | | | TSFGLLKL |
| 520 | A | 122 | 325 | PTCVYVCVLKQKCVCVCACVARAACT/ |
| | | | | CVPVF/VCLCV*KP/W*GFNCGVFPCIQV |
| | | | | YAFFFWRIGSNGCYY |
| 521 | A | 3 | 636 | RSPLLEWLPTLCFYNGKGLEQIERDNSF |
| | | | | HNVAEATFTLKLIQSLIASGIAGSMIGVIT |
| | | | | LYKSQMYKLCHLLSAVDFHHPKIKTVQ |
| | | | | VSTVDAFKEAKEIIILSCVRTRQVGFIDS |
| | | | | EKRMNVALTRGKRHLLIVGNLACLRKN |
| | | | | QLWGRVIQHCEGREDG\FNMQTSMNHS |
| | | | | *TISLKIILKNKWKKNRRKRVKKRNLKIN |
| | | | | LIHKKTWCKYFVFM |
| 522 | A | 3 | 130 | TTTALGLLTIPIIIHPIDRSVDFLLDSSLRK |
| | | | | LYPTVGKPSSS |
| 523 | A | 275 | 358 | SWRTAPGPTGQSPWARPRTQPQCCSPGG |
| 524 | A | 3 | 147 | FLTPSPESPDQWSSSSPHSNVSDWSEGVS |
| | | | | SPPTSMQSQIARIPEAFK |
| 525 | A | 1 | 849 | GSEQASSVSSHASGEFRFTSEVPIRFDYH |
| | | | | GKHVSMDQGTLAGILIGLAQLNCSELKL |
| | | | | KRLSYRGLLGVDKLFSYAITEWLNDIK |
| | | | | KNQLPRILGGVGPMHSLVQLVQGLKDL |
| | | | | VWLPIEQYRKDGRIVRGFQRGAASFGTS |
| | | | | TAMAALELTNRMVQTIQAAAETAYDM |
| | | | | VSPGTLSIEPKKTKRFPHHRLAHQPVDLR |
| | | | | EGVAKAYSVVKEGITDTAQTIYETAARE |
| | | | | HESRGVTGAVGEVLRQJPPAVVKPLIVA |
| | | | | TEATSNVLGGMRNQIRPDVRQDESQKW |
| | | | | RHGDD |
| 526 | A | 1 | 329 | PSHPSSFGSAPHPHLLPTTPAAPFPAQAS |
| | | | | ECPVAAATAPHTPGPCQSSHLPSTSMP\P |
| | | | | *RCPHH/SSGCSHPCIGHCGGHCSGPSPPT |
| | | | | L*L*GCP*L*/PGMGVG*GSMYPPT |
| 527 | A | 3 | 417 | ELKTFSCSLLHDGDPTYQRLFLDCLVHS |
| | | | | LRELHTGDVMILPVLSCFTRFMAGLIFVL |
| | | | | HSCFRFITFYCPTSSDPLRTCAVLLCVGY |
| | | | | QDLPNPVFRYLQSVNELLSTLLNSDSPQ |
| | | | | QVLQFVPNGRYSLRPYCLIFCGI |
| 528 | A | 3 | 400 | LIY/CNFDLLRRDVLYYKGRLDMDGLEV |
| | | | | VDLKDGKDRDLHVSIRNAFRLHRGATG |
| | | | | DSHLLCTRKPEQKQRWIKAFAREREQV |
| | | | | QLDQETGF/SITELQRKQAMLNASK/QLM |
| | | | | QVLQFVPNGRYSLRRPCLIFCGI |
| 529 | A | 1 | 337 | GLKGRGLKHYPIRDAGLGTSNQAGSWR |
| | | | | GQVGFRDVVVGPSLSAAAGGQGLVLTAV |
| | | | | CPLLLESQPLWPYDLQGSLTFRDVAIEFS |
| | | | | LEEWQCLDTAQQNLYRNVMLENYRNL |
| | | | | VFL |
| 530 | A | 91 | 556 | GEAEMEERAFVNPFPDYEAAAGASSAS |
| | | | | GAAEETGCVRPPATTDEPGLPFHQDGKII |
| | | | | HNFIRRIQTKIKDLLQQMEEGLKTADPH |
| | | | | DCSAYTGWTGIALLYLQLYRVTCDQTY |
| | | | | LAPI/HLITEKIKPLRKLNGRRVTFLCGDA |
| | | | | GPLAVGAVIYHKLRSD |
| 531 | A | 60 | 281 | TFTII*KMTACLS*SLL*KILESFKAS**NA |
| | | | | SG*PRMTGVTITIGKT*IEE*TSQFMAKLS |
| | | | | ALVTVTNSHRYP |
| 532 | A | 3 | 687 | EDLLQFSANIPALYNSKQLEDFFKGGIIN |
| | | | | DSSELIGPAEAIISDSLIDTFPECSTEGFSS |
| | | | | DSDLVSLTVDVDSLAELDDGMASNQNS |
| | | | | PIRTFGLNLSSDSSALGAVASDSEQSKTE |
| | | | | EERESRSLFPGSLKPKLGKRDYLEKAGE |
| | | | | LIKLALKKEEEDDYEAASDFYRKGVDLL |
| | | | | LEGVQGESSPTRREAVKRRTAEYLMRA |
| | | | | ESISSLYGKPQLDDVSYVCLQLLMALLLI |
| 533 | A | 3 | 371 | VRLACPAVPTTVVKQRLQMYNSQHRSA |
| | | | | ISCIRTVWRTEGLGAFYRSYTTQLTMNIP |
| | | | | FQSIHFIFFCRVLPMGPLLPNALERGGEP |
| | | | | RPLTGRLCAGTSEVVYDRKDLGRGARN |
| | | | | CFFSSSLGRM |
| 534 | A | 47 | 459 | GFGYEQDSDSRLANQSGEDHSSAQVSGT |
| | | | | SVLCI/LLIVHALTLVWRGRSFALSISLKT |
| | | | | RMHPSSSVVIYRRRNGKRCPNAAPKPEK |
| | | | | KDGVSFCAEHVRRNALALHAQMKKTNP |
| | | | | GPVGETLLCQLSSYAKTELGVSDSRK |
| 535 | A | 204 | 1373 | GRKKRRNTQKWLREWRAAQGKDPGPS |
| | | | | EKQKPVFTPLRRPGMLVPKQNVSPPDMS |
| | | | | ALSLKGDQALLGGTFYFLNIFSHGELppH |
| | | | | CEQRFLPCEIGCVKYSLQEGIMADFHSFI |
| | | | | NPGEIPRGF*FHCQAASDSSIIKIPISNFER |
| | | | | GHNQATVLQNLYRFIHPNPGNWPPIYCK |
| | | | | SDDRTRVDWCLKBMAKASEIRQDLQLL |
| | | | | TVEDLVVGIYQQKFLKEPSKTWIRSLLD |
| | | | | VAMWDYSSNTRCKWIIEENDILFCALAv |
| | | | | CKKIAYCISNSLATLFGIQLTEAHVPLQD |
| | | | | YEASNSVTPKMVVLDAGRYQKLRVGSS |
| | | | | GFSIIFNSSNEEQRSNTPIGDYPSRAKISG |
| | | | | QNSSVRGRGITPPLLESISNSSSNIHKFSN |
| | | | | CDTSLSPYMSQKDGYKSFSSLS |
| 536 | A | 5 | 565 | SPSSGSCPSPSPAHSSSDSITQVIGVQVAF |
| | | | | GYISCLPThRPLSRTCCLLSPPSPLTLTLSP |
| | | | | KPLPLLRTAPPVRPPP*PPVLPRRPRPRLT |
| | | | | QTLYRLARPPLPRGPAPLPPPRPQLQPPR |
| | | | | SPPSLT*ATPRPQPLPLAICLLVSWLTKGL |
| | | | | SSAQAPLLVSGRPLRLLRPASPPLHQSPP |
| | | | | RLGQPVL |
| 537 | A | 1020 | 1221 | QSPGKSCMVGSGCGSRGPPCGLCFTAIT |
| | | | | HMLVIYLMPLLEGPINSYYLKQKASNGV |
| | | | | VITPKGHSWG |
| 538 | A | 3 | 590 | IRDSGECSDCGKTFSCSSALILHRRIHTGE |
| | | | | KPYECNECGKTFSWSSTLTHHQRIHTGE |
| | | | | KPYACNECGKAFSRSSTLIHHQRIHTGEK |
| | | | | PYECNECGKAFSQNSHLYQHQRI\HTGE |
| | | | | KPYECMECGGKFTY\SSGLIQHQRIHTGE |
| | | | | NPYECSECGKAFRYSSALVRHQRIHTGE |
| | | | | KPLNGIGMSKSSLRVTTELNIREST |
| 539 | A | 2 | 410 | RRVLCYPLYRHFKLVMRAYRDTIDILQL |
| | | | | GKSAALKCLLDIHKIFQDNDPAYILNDL |
| | | | | YISYYCVWIHKVKSKKLSDLAEALKEVS |
| | | | | LTKAQLGLEL*ELEAAALLVQEEETALK |
| | | | | AAHSVSGQQTLCSSSEASDSEDSY |
| 540 | A | 3 | 311 | DEENRGSYTEGLHENGVCCSDPLSSLLES |
| | | | | RMEVDDYSQYEEESTDDSSSSEGDEEED |
| | | | | DYDDDFEDDFIPLPPAKRLRLIVGKDSIDI |
| | | | | DISSRRREDQSLRLNA |
| 541 | A | 31 | 497 | DHCSPTSDSSLSVPQLPHLVSEDLG*GLR |
| | | | | RRSPSFVQSRTGWPMSQESLTFKDVFVD |
| | | | | FTLEEWQQLDSAQKNLYRDVMLENYSH |
| | | | | LVSVGYLVAKPDVIFRLGPGEESWMAD |
| | | | | GTPVRTCAGEDRPDVSIFASLYFEVLLL |
| | | | | EVWQVDEQIDHYKES |
| 542 | A | 3 | 433 | IGACLADVDPMQLDSSVRFDSVGGLSNH |
| | | | | IAALKEMVVFPLLYPEVFEKFKIQPPRGC |
| | | | | LFYGPPGTGKTLVARALANECSQGDKR |
| | | | | VAFFMRKGADCLSNSVGESQRQPRLLFD |
| | | | | QAYQRRQQFISFDEIDGLAPVRSRRQDQI |
| | | | | HR |
| 543 | A | 1 | 660 | GWLVTAFCTSSSKEGGWALFLFLLEEGL |
| | | | | AQVFSFSLPHIHLTASRPPLSPSPPWMTPS |
| | | | | PDYLVYLFGITAGPTGAKLGSDEKELILL |
| | | | | FWKVVDLANKKVGQLHEVLVRPDQLEL |
| | | | | TEDCKEETKIDVESLSSASQLDQALRQF |
| | | | | NQSVSNELMGVGTSFCLCTDGQLHVRQ |
| | | | | ILHPEASKKNVLLPECFYSFFDLRKEFKK |
| | | | | CCPGSPDIDKLDVAPMTECIL |
| 544 | A | 59 | 526 | STKTQPLLRNSDKDSKTNLLPTPTHHR/P |
| | | | | NTSQGP*/MKASPPHPPPQA\KNHSSVEY |
| | | | | SP\GTRSIPPPSFLPLFP*QSQHCPPAASLA |
| | | | | LPKQHPPPGRGSCTVLVPPPETYFFSSAL |
| | | | | LVFRPPSLYGGPFRYRERKRKGRGGRD |
| | | | | FLVQYNQKIFLKS |
| 545 | A | 1757 | 1944 | IPAEV\VKQRLQDVQLRSTGQQSGCIRTV |
| | | | | \WRTEGLGAFYRSYTTQLNMNIPFQSIHF |
| | | | | ITYESC |
| 546 | A | 1240 | 1526 | ERVLLCLPGLGCGGVILAIIGSLAIPGSSS |
| | | | | LHLSLQSSWGLTGM*YDARLIFVYFFRE |
| | | | | MGSCHICQAGLNSYNSSIPPTLVSQNVG |
| | | | | TPGLKPPRPS |
| 547 | A | 617 | 810 | TETRPRAALPAGLLGTARGPGRGANSAP |
| | | | | SAPGGKARPGKAGCGGCRKSEPPLRGRP |
| | | | | LKGRPSAA |
| 548 | A | 775 | 1169 | MAAMCFWALIPNQVFRGFQMTLKMQY |
| | | | | LFLSFFPSFFLGTRVGARSPGWGCWECS |
| | | | | GAISAHCSLCFPGSSVSPASAFRVAGITG |
| | | | | MYHYAWLIFISIFLVEMGFHHVCQAGLE |
| | | | | LLA\*VIRPPQPPKVLGLQAR |
| 549 | A | 731 | 914 | LGTHLTSAFLCVFSKSIIKKFWPGAV/AH |
| | | | | ACNPSTLGGRRE*IT*GQDFETSLANMA |
| | | | | KLCLY |
| 550 | A | 984 | 1382 | HSKFNVFKLVGAPAENTSSSALLFFHTR |
| | | | | LGPAIQERMKGGAPGGEGRALAGRPSQP |
| | | | | LTESCPCLKMYFILASGSLPFLPFPLYCL |
| | | | | KNRFEAQVRCLTSVIPThWEAEMGGLLE |
| | | | | PRKFKTSTGQHSETPSLNK |
| 551 | A | 3058 | 3698 | GGCPNDKVQDLGWVVEGWELEWALLC |
| | | | | FCAENCYGSFPLTASVGEPNMRHKHPLE |
| | | | | LHRSCALLSSGISLENSSQQLMEVSPVHR |
| | | | | LCMDFAQVPFPSCADTCIFGLHVSTCPL |
| | | | | HSDFFFKRQHLTLSPRLEYSGVITAHCSL |
| | | | | KLLGSGNPPASASRVAGSTGACHHAHLI |
| | | | | FLSFIDTGLTVAQAGLELLASGDPPALAY |
| | | | | QNAGIIGMNHCAWPSL |
| 552 | C | 22 | 165 | MKKEKEEADCWSVKEILAGRGGHACNP |
| | | | | STLGGRGGWITRSGDRDHPG* |
| 553 | A | 3 | 351 | QGWPPPKPDRQSTQACGACTQTLQRPW |
| | | | | SLYMLVKPWPWRGDPGRLGPRLLPPPR |
| | | | | KDCPRWFSQKAGAPGPPWSPGGIIPAIPA |
| | | | | QTP*RS*ETALPEASPLCYDAPGSTGQGP |
| | | | | ITP |
| 554 | A | 544 | 700 | ITNKCSFSIGIKDYSNWPTIPQVYLNGEF |
| | | | | VGGCDILLQMHQNGDLVEELKKI |
| 555 | A | 3 | 592 | TLPQAQKLTDDQGPVLMSTVAMPVFSK |
| | | | | QNETRSKGILLGVVGTDVPVKELLKTIP |
| | | | | KYKLGIHGYAFAITNNGYILTHPELRLLY |
| | | | | EEGKXRRKPN\YSSVDLS\EVBWED\RDD |
| | | | | \VLRNAMVNRKD/TGKFSMEVKKTVDK |
| | | | | GKRVLVMTNDYYYTDI\KGTPFSLG\VA |
| | | | | L\SRGHGKYFFPREGNPSEEGLHDLEHPD |
| | | | | VSFGR |
| 556 | A | 36 | 483 | VTLRLLKRIRPSRPRRRNEVTSLLRDAAN |
| | | | | ITEMDSENSAKEGDPGTIFFFREGAAVFR |
| | | | | NVKDKTMKHVMNVLQKHEIQPYEIALV |
| | | | | HWENEELNYIQIQGQSKLHRGEIKLNS*L |
| | | | | DLHDAILEKFAFSNALCLSVKLAIWEAS |
| | | | | LDKFIES |
| 557 | A | 1 | 465 | PTRPEKLISQIQPEVDRERAVVEVNIPVES |
| | | | | EVNLKLQNIMMLLRKCCNHPYLIEYPID |
| | | | | PVTQEFIDEELVTNSGKFLILDRMLPEL |
| | | | | KKRGHKVLLFSQMTSMLDILMDYCHLR |
| | | | | DFNFSRLDGSMSYSEREKNMHSFNTDPE |
| | | | | VFIFLVSTRAGGL |
| 558 | A | 337 | 725 | LIGLIQMYLPSSYQENDCBGNDGSRRPA |
| | | | | ENSLGESHRKCTLQKRNRNQRTQKRKIY |
| | | | | NYCPRKGKKIFTHMHEIIQIDGHIYQCLE |
| | | | | CKQNFCENLIRSYYVVERTHTGEKPY*CI |
| | | | | QGTGIYDHLSE |
| 559 | A | 1 | 1449 | LVSEHAFEIPDNVRPGHLIKELSKVIRAIE |
| | | | | EENGKPVKSQGIPIVCPVSRSSNEATSPY |
| | | | | HSRRKMRKLRDHNVRTPSNLDILELHTR |
| | | | | EDILSSKLNGKFNKHLQPSSTVPEWRAK |
| | | | | DNDLRLLLTNGRIIKDERQPFADQSLYT |
| | | | | ADSENEEDKRRTKKAKMKIEESSGVEG |
| | | | | VEHEESQKPLNGFFTRVKSELRSRSSGYS |
| | | | | DISESEDSGPBCTALKSIFTTEESESSGDE |
| | | | | KKQEITSNFKEESNVMRNFLQKSQKPSR |
| | | | | SEIPIKRECPTSTSTEEEAIQGMLSMAGL |
| | | | | HYSTCLQRQIQSTDCSGERNSLQDPSSCH |
| | | | | GSNHEVRQLYRYDKPVECGYHVKTEDP |
| | | | | DLRTSSWIKQFDTSRYHPQDLSRSQKCIR |
| | | | | KEGSSEISQRVQSRNYVDSSGSSLQNGK |
| | | | | YMQNSNLTSGACQISNGSLSPERPVGET |
| | | | | SFSVPLHPTKIRPASNPPPJSNQATKGKRP |
| | | | | KKGMATAKQRLGKILKLNRNGHARFFV |
| 560 | B | 471 | 766 | XIFAAKELENEENQEEQGLEEKGEEFAR |
| | | | | MLTELLFELHVAATPDKLNKAMKRAHD |
| | | | | WVEEDQTVVSVDVAKSVRRRNKEGRK |
| | | | | GREISRPSRRQKGGKEN* |
| 561 | A | 209 | 453 | AHVDTMSKAHPPELKKFIDKKLSKLNG |
| | | | | GRHVQGILWGFDPLNMNLVIDKCVEMAT |
| | | | | SGQQKNIGMVVIRRNSIIMLETLEQE |
| 562 | A | 1 | 816 | MRDEDKPEDEMAQKRASLLERQQRRAE |
| | | | | EARRRKQWQEVEKEQRREEAARLAQEE |
| | | | | APGPAPLVSAVPMATPAPAARAPAEEEV |
| | | | | GPRKGDFTRQEYERRAQLKLMDDLDKH |
| | | | | AALRGIQRLTDSGHQVNNVEVIARRCER |
| | | | | FAGTETERLEDLNSLARLTTTNTIVLAVR |
| | | | | GGYGASRLLADIDWQALVARQQHDPLL |
| | | | | ICGHSDFTAIQCGLLAHGNVITFSGPMLV |
| | | | | ANFGADELNAFTEHHFWLALRNETFTIE |
| | | | | WQGEGPKFRGRRHSCGEAILRC |
| 563 | A | 134 | 520 | GKNYQNPKSNAVSLLSHLWLANTAAAL |
| | | | | RINTDLLPTSYQLVKFEDIVHFPQKTTERI |
| | | | | FAFLGIPLSPASLNQILFATSTNIYYLPYE |
| | | | | GEISPTNTNVWKQNLPRDEIKLIENICWT |
| | | | | LMDRLGYPKFMD |
| 564 | A | 3 | 356 | VLEETYECIRGDKGFQFFSSQQVSHHPPIS |
| | | | | A\CHAESINVGYWLDARWT\SLLW\GKS |
| | | | | MQIVPIGTNHVTLPL\FGDHIEWNKLTSCI |
| | | | | HIILSVQKWIEHYGEIAIKNLLDDCCYCH |
| | | | | TNFI |
| 565 | A | 1 | 438 | INTLLLSGGKGGKNKKNKNSSKPQKNN |
| | | | | GSTWANVPLPPPPVQPLPGTBLEHYAVE |
| | | | | QQENGYDSDSWCPPLPVQTYLHQGLED |
| | | | | ELEEDDDRVPTPPVRGVAS\SPAISFGQQ |
| | | | | ST\ATLTPFPTGRRWQPMAGRLHLGWSL |
| | | | | TRRPIQF |
| 566 | A | 1 | 2692 | LDLCRQSNNLCLQREEDLQRTRDYHDC |
| | | | | MNVVEVFLEKFTTEWDNLARSDAESTA |
| | | | | VHLEALKKLALALQERKYAIEDLKDQK |
| | | | | QKMIEIILNLDDKRLVKEQTSHLEQRWF |
| | | | | QLEDLIKRKIQVSVTNLEELNVVQSRFQE |
| | | | | LMEWAEEQQPNIAEAIKQSPPPDMAQN |
| | | | | LLMDHLAICSELEKQMLLKSLIKDADR |
| | | | | VMADLGLNERQVIQKALSDAQSHVNCL |
| | | | | SDLVGQRRKYLNKALSEKTQFLMAVFQ |
| | | | | ATSQIQQHERKIMFREHICLLPDDVSKQV |
| | | | | KTCKSAQASLKTYQNEVTGLWAQGREL |
| | | | | MKEVTEQEKSEVLGKLQELQSVYDSVL |
| | | | | QKCSHLQELEICNLVSRHFKEDFDDA |
| | | | | CHWLKQADIVTFPEINLMNESTELHTQL |
| | | | | AKYQNILEQSPEYENLLLTLQRTGQTILP |
| | | | | SLNEVDHSYLSEKLNAIPRQFNVIVALA |
| | | | | KDKFYKVQEMLARKEYASLIELTTQSLS |
| | | | | ELEAQFLRMSKVPTDLAVEEALSLQDGC |
| | | | | RAILDEVAGLGEAVDELNQKKEGFRSTG |
| | | | | QPWQPDKMLHLVTLYHRLKRQTEQRVS |
| | | | | LLEDITSAYQEIHEKMCQQLERQLKSVK |
| | | | | EEQSKVNEETLPAEEKLKMYHSLAGSLQ |
| | | | | DSGIVLKRVTIHLEDLAPHLDPLAYEKA |
| | | | | RHQIQSWQGELKLLTSAIGETVTECESR |
| | | | | MVQSIDFQTEMSRSLDWLRRVKAELSGP |
| | | | | VYLDLNLQDIQEEIRKIQIHQEEVQSSLRI |
| | | | | MNALSHIKEKEKFTKAKELISADLEHSLA |
| | | | | ELSELDGDIQEALRTRQATLTEIYSQCQR |
| | | | | \YYQVFQAANDWLEDAQEMLQLAGNG |
| | | | | LDVESAEENLKSHMEFFSTEDQFHSNLE |
| | | | | ELHSLVATLDPLIKPTGKEDLEQKVASLE |
| | | | | LRSQRMSRDSGAQVDLLQRCTAQWHD |
| | | | | YQKAREEVID |
| 567 | A | 459 | 1551 | TDTESYPEFLQRQHSSPWGPPQALDSGT |
| | | | | AWLRCHGPDRSCSHGAGDGQIALLPLD |
| | | | | RKPAKPLWFRPALCSPRKHFDGELGDST |
| | | | | HPAPNWAGFNFTLLLTWALEPQAGGGED |
| | | | | ALPLRILKRLDNADEQAAQIRRELDGRL |
| | | | | QLADKMAKKYVNVILEEKKSRWPETLG |
| | | | | LICEVVPDVPSNPMNELVQERKFPKFIAK |
| | | | | DMENMYIEELRSSVNLLMANLESLPVSK |
| | | | | GGPEFKLQKLKRSQ\NSAVLDIGDENEIQ |
| | | | | LSKSDVVLSFTLEIVIMEVQGLKSVAPNR |
| | | | | IVYCTMEVEGEKLQTDHAEASRPQWGT |
| | | | | QGDFTTTHPRAV\VKVKLFTESTGVLAL |
| | | | | EDKELVRVILYPTSNSSKSAELHRMVVP |
| | | | | KN |
| 568 | A | 2 | 291 | AERRGAVSPRSRDGGGVGGPCAMATSV |
| | | | | LCCLRCCRDGGTGHIPMEMPAVHLLT |
| | | | | QLMGSDVCIVPSCLPLCGI*VWLLLCAIP |
| | | | | RCLIFFTFWWGVG |
| 569 | A | 336 | 665 | YQRCNRKATCAPRRLRAFSLASRAPRRG |
| | | | | THRTPGRDSSLR*LRTRRPPPPSPPRNKP |
| | | | | RQRAVGRGQSPCRDQSEPRRLRSLYHGQ |
| | | | | VPSVVRAAPKKMSPEAVPLGASLPP |
| 570 | A | 2 | 710 | RDALGAGCRILLICEMQLTHQLDLFPEC |
| | | | | RVTLLLFKDVKNAGDLRRKAIVEGTIDG |
| | | | | SLINPTVFHSCCPGWSAMARSWLTATSA |
| | | | | SRVQAVVLPQPPELLGLQIVDPF\QILVA\ |
| | | | | ANKAVII\LYKLGKNGRQ*TLSTEIYFQPF |
| | | | | PPNNQYFTRL*KNFGISAN*HFQFLIVYIE |
| | | | | EGEKQ\NQEYLISQVEGHQVSLKNPP\EI |
| | | | | MNKTEIMSTKIYKLSSQEESIGTLLDAHC |
| | | | | RMSTKDVL |
| 571 | A | 149 | 732 | TGTVAAKAMDTFSTKSLALQAQKKLLS |
| | | | | KMASKAVVAVLVDDTSSEVLDELYRAT |
| | | | | REFTRSRKEAQKMLKNLVKVALKLGLL |
| | | | | LRGDQLGGEELALLRRFRHRARCLAMT |
| | | | | AVSFHQVDFTFDRRVLAAGLLECRDLLH |
| | | | | QAVGP\SLISKSHGRINH\VFGHLADCDFL |
| | | | | AALYGPAEPYRSHLRIUCEGLGRMLDEG |
| | | | | SL |
| 572 | A | 820 | 975 | SGIGDFDINKDAAAAASRGVGAKLGP*R |
| | | | | AVAGEHTHDPGAGPLPDAFQGLQP |
| 573 | A | 1 | 130 | SGSSWRPGSSPKTGAQIREARRAPAGAQ |
| | | | | RIGGRRSLEHSLHAP |
| 574 | A | 2 | 460 | ARAHTHREPTMVLSPADKTNVKAAWG |
| | | | | KVGAHAGEYGAEALERMLLSFPTTPTYF |
| | | | | PHFDLNHGSAHVKGHGKNVDDALTNA |
| | | | | VTHVYYMPNSLYALSDLHPHNLRMDPV |
| | | | | NFMLLSHCLL*TLVVHLPAELTPAVHAS |
| | | | | LNNVLESERTELTSSTS |
| 575 | A | 2 | 460 | ARAHTHREPTMVLSPADKTNVKAAWG |
| | | | | KVGAHAGEYGAEALERMLLSFPTTPTYF |
| | | | | PHFDLNHGSAHVKGHGKNVDDALTNA |
| | | | | VTHVYYMPNSLYALSDLHPHNLRMDPV |
| | | | | NFMLLSIICLL*TLVVHLPAELTPAVHAS |
| | | | | LNNVLESERTELTSSTS |
| 576 | A | 1905 | 2231 | KLPPSPWPLACSAAEQVTLGRNTVSSEK |
| | | | | LAGGRVHLSPYCDPWIPHCATPEQAGAP |
| | | | | QDKDDLLMASWPVGICLPTTVAYRSPKQ |
| | | | | EFPCFKVTAKTNRRIKIHVFEPSGFH |
| 577 | A | 38 | 118 | AGIRYISSFIFFFDIYQSPSMHQTLL |
| 578 | A | 135 | 466 | GTDTLLTINQN*SLKTRQ*FTLIIF/IFFFFL |
| | | | | RWSL/DSVAQAGVQWRDLGSLQAPPRG |
| | | | | ETPFSCLSLPSSWDYRRPLPRPANFFYF** |
| | | | | RRGFTMLARMVSIS*PRDLPAEFL |
| 579 | A | 1 | 531 | NLFHAKPERRDSANLWVLVDCIFRDTSE |
| | | | | DLGFQCDAVNLAFGRRCEELEDARIIKL |
| | | | | QHIILHKMLREITDQEHNVVALKIEAIKD |
| | | | | KEEPLHIAQTRL*LLSHRPNMQLAPNAA |
| | | | | QFSPSSILPPNTPKLLQAEQSLRNLKDIH |
| | | | | MSLEKDVTAMTNSVFIDRQKCMAHRTC |
| | | | | YPTILQLAGYQ |
| 580 | A | 1 | 531 | NLFHAKPERRDSANLWVLVDCIFRDTSE |
| | | | | DLGFQCDAVNLAFGRRCEELEDARHKL |
| | | | | QHflLHKMLREITDQEHNVVALKEAIKD |
| | | | | KBEPLHIAQTRL*LLSHRPNMQLAYNAA |
| | | | | QFSPSSILPPNTPKLLQAEQsLRNLKDIH |
| | | | | MSLEKDVTAMTNSVFIDRQKCMAHRTC |
| | | | | YPTILQLAGYQ |
| 581 | B | 192 | 382 | XSDDEEQLTELDEEMENEICRVWDMSM |
| | | | | DEDVALFLQEFNAPDIFMGVLAKSKCPR |
| | | | | LREICVGILX* |
| 582 | A | 1 | 134 | SSKFWD*SLAPKHSG*TKNMDCYCIIPTC |
| | | | | IGRBRCYGTCIGDTV |
| 583 | A | 1 | 403 | VLSLLWEFALEPRVRHELTLSLLFRKRR |
| | | | | ADMIPRVLVFRALLMVLIFLFVASYWLF |
| | | | | YGVPJLDSRDRNYHG1YQYAVSLVDAIL |
| | | | | FIHYLATVLLELRQLQPMLFTLQVVRSTDG |
| | | | | ESRFYSL*HLSIQRAALVVLEN |
| 584 | A | 3 | 599 | IRTSRTGVSLLVPNGAIPQGKFYEMYLLI |
| | | | | NKAESTLPLSEGTQTVLSPSVTCGPTGLL |
| | | | | LCRPVILTMPHCAEVSARDWIFQLKTQA |
| | | | | HQGHWEEVVTLDEETLNTPCYCQLEPR |
| | | | | ACHILLDQLGTYVFTGESYSRSAVKRLQ |
| | | | | LAVFAPALCTSLEYSLRVYCLEDTPVAL |
| | | | | KEVLELERTLQGYLVEEPKPLMFKDSYEI |
| | | | | NL |

[0419] TABLE 7

| | Position of | | |
|---|---|---|---|
| SEQ | end of signal | MaxS | MeanS |
| ID | in amino | (maximum | (mean |
| NO: | acid sequence | score) | score) |
| 1 | 30 | 0.928 | 0.784 |
| 2 | 22 | 0.960 | 0.789 |
| 4 | 16 | 0.991 | 0.955 |
| 5 | 33 | 0.972 | 0.922 |
| 6 | 24 | 0.962 | 0.730 |
| 7 | 33 | 0.931 | 0.710 |
| 18 | 31 | 0.987 | 0.804 |
| 24 | 22 | 0.960 | 0.789 |
| 25 | 30 | 0.986 | 0.858 |
| 39 | 16 | 0.991 | 0.955 |
| 40 | 23 | 0.989 | 0.917 |
| 49 | 33 | 0.972 | 0.922 |
| 63 | 28 | 0.962 | 0.806 |
| 66 | 31 | 0.987 | 0.852 |
| 72 | 19 | 0.956 | 0.866 |
| 73 | 18 | 0.966 | 0.843 |
| 110 | 19 | 0.969 | 0.933 |
| 125 | 20 | 0.995 | 0.971 |
| 127 | 21 | 0.984 | 0.854 |
| 129 | 17 | 0.992 | 0.957 |
| 135 | 44 | 0.916 | 0.654 |
| 140 | 17 | 0.992 | 0.957 |
| 142 | 16 | 0.907 | 0.567 |
| 144 | 49 | 0.973 | 0.705 |
| 146 | 26 | 0.962 | 0.874 |

1. An isolated polynucleotide comprising a nucleotide sequence selected from the group consisting of SEQ ID NO: 1-146, or 293-438, a mature protein coding portion of SEQ ID NO: 1-146, or 293-438, an active domain coding portion of SEQ ID NO: 1-146, or 293-438, and complementary sequences thereof.

2. An isolated polynucleotide encoding a polypeptide with biological activity, wherein said polynucleotide hybridizes to the polynucleotide of claim 1 under stringent hybridization conditions.

3. An isolated polynucleotide encoding a polypeptide with biological activity, wherein said polynucleotide has greater than about 90% sequence identity with the polynucleotide of claim 1.

4. The polynucleotide of claim 1 wherein said polynucleotide is DNA.

5. An isolated polynucleotide of claim 1 wherein said polynucleotide comprises the complementary sequences.

6. A vector comprising the polynucleotide of claim 1.

7. An expression vector comprising the polynucleotide of claim 1.

8. A host cell genetically engineered to comprise the polynucleotide of claim 1.

9. A host cell genetically engineered to comprise the polynucleotide of claim 1 operatively associated with a regulatory sequence that modulates expression of the polynucleotide in the host cell.

10. An isolated polypeptide, wherein the polypeptide is selected from the group consisting of:
(a) a polypeptide encoded by any one of the polynucleotides of claim 1; and
(b) a polypeptide encoded by a polynucleotide hybridizing under stringent conditions with any one of SEQ ID NO: 1-146, or 293-438.

11. A composition comprising the polypeptide of claim 10 and a carrier.

12. An antibody directed against the polypeptide of claim 10.

13. A method for detecting the polynucleotide of claim 1 in a sample, comprising:
a) contacting the sample with a compound that binds to and forms a complex with the polynucleotide of claim 1 for a period sufficient to form the complex; and
b) detecting the complex, so that if a complex is detected, the polynucleotide of claim 1 is detected.

14. A method for detecting the polynucleotide of claim 1 in a sample, comprising:
a) contacting the sample under stringent hybridization conditions with nucleic acid primers that anneal to the polynucleotide of claim 1 under such conditions;
b) amplifying a product comprising at least a portion of the polynucleotide of claim 1; and
c) detecting said product and thereby the polynucleotide of claim 1 in the sample.

15. The method of claim 14, wherein the polynucleotide is an RNA molecule and the method further comprises reverse transcribing an annealed RNA molecule into a cDNA polynucleotide.

16. A method for detecting the polypeptide of claim 10 in a sample, comprising:
a) contacting the sample with a compound that binds to and forms a complex with the polypeptide under conditions and for a period sufficient to form the complex; and
b) detecting formation of the complex, so that if a complex formation is detected, the polypeptide of claim 10 is detected.

17. A method for identifying a compound that binds to the polypeptide of claim 10, comprising:
a) contacting the compound with the polypeptide of claim 10 under conditions sufficient to form a polypeptide/compound complex; and
b) detecting the complex, so that if the polypeptide/compound complex is detected, a compound that binds to the polypeptide of claim 10 is identified.

18. A method for identifying a compound that binds to the polypeptide of claim 10, comprising:
a) contacting the compound with the polypeptide of claim 10, in a cell, under conditions sufficient to form a polypeptide/compound complex, wherein the complex drives expression of a reporter gene sequence in the cell; and
b) detecting the complex by detecting reporter gene sequence expression, so that if the polypeptide/compound complex is detected, a compound that binds to the polypeptide of claim 10 is identified.

19. A method of producing the polypeptide of claim 10, comprising,
a) culturing a host cell comprising a polynucleotide sequence selected from SEQ ID NO: 1-146, or 293-438, a mature protein coding portion of SEQ ID NO: 1-146, or 293-438, an active domain coding portion of SEQ ID NO: 1-146, or 293-438, complementary sequences thereof and a polynucleotide sequence hybridizing under stringent conditions to SEQ ID NO: 1-146, or 293-438, under conditions sufficient to express the polypeptide in said cell; and
b) isolating the polypeptide from the cell culture or cells of step (a).

20. An isolated polypeptide comprising an amino acid sequence selected from the group consisting of any one of the polypeptides SEQ ID NO: 147-292, or 439-584, the mature protein portion thereof, or the active domain thereof.

21. The polypeptide of claim 20 wherein the polypeptide is provided on a polypeptide array.

22. A collection of polynucleotides, wherein the collection comprising the sequence information of at least one of SEQ ID NO: 1-146, or 293-438.

23. The collection of claim 22, wherein the collection is provided on a nucleic acid array.

24. The collection of claim 23, wherein the array detects full-matches to any one of the polynucleotides in the collection.

25. The collection of claim 23, wherein the array detects mismatches to any one of the polynucleotides in the collection.

26. The collection of claim 22, wherein the collection is provided in a computer-readable format.

27. A method of treatment comprising administering to a mammalian subject in need thereof a therapeutic amount of a composition comprising a polypeptide of claim 10 or 20 and a pharmaceutically acceptable carrier.

28. A method of treatment comprising administering to a mammalian subject in need thereof a therapeutic amount of a composition comprising an antibody that specifically binds to a polypeptide of claim 10 or 20 and a pharmaceutically acceptable carrier.

The application's sequence listing, which the Patent Office published only in electronic form, follows.

SEQUENCE LISTING (584 sequences)

SEQ ID NO: 1 - DNA, 2584 bp, Homo sapiens
  CDS (365)..(1981)
aaagccctcctcccgggccaaggtagaggaagttgggctcccgcctggctgggaggcgggagggatcccgctcctgttgttttccgccggcaggagtaggctggcgggcgcagggggcggggtgcgccctccctccccggccagggcgctcgggagcggggacccgagcctgcagccgagctccgctgccggccctggacactcggctcagccaagcatccttcctgggggccgaggaagtggggccactctgccgttccgaggacctgggaggagccctcggtaccccgggccccggggccctggggcacacacgtccagcccagcccgagcctgcgtttcctgagccgggatctggggcgagatggccgcaggcggcagtgcgcccgagccccgcgtcctcgtctgcctcggggcgctcctggccggctgggtcaccgtaggattggaggctgttgtcatttggagaagttatgagaatgttactctgcactgtggcaacatctcgggactgaggggccaggtgacctggtaccggaacaactcggagcctgtcttccttctctcgtccaactctagcctccggccagctgagcctcgcttctctctagtggatgccacctccctgcacattgaatcgctgagcctgggagatgagggaatctacacctgccaggagatcctgaatgtgactcagtggttccaagtgtggctgcaggtggccagcggcccctatcagattgaggtccacatcgtggccaccggcacactccccaacggcaccctctacgcagccaggggctcccaggtggacttcagctgcaacagcagctccaggccaccacccgtggttgaatggtggttccaggccctgaattccagcagcgagtcctttggccacaacctgacagtcaactttttctcactgttactgatatcgccaaacctccaagggaactacacctgtttagccttgaatcagctcagcaagagacatcgaaaggtgaccaccgagctcctggtctactatccccctccatcagctccccagtgctgggcacagatggcatcaggatcgttcatgttgcagcttacctgtcgctgggatgggggataccctgaccctgacttcctgtggatagaagagccaggaggtgtaatcgtggggaagtcaaagctgggggtggaaatgctgagcgagtcccagctgtcggatggcaagaagttcaagtgtgttacaagccacatagttgggccagagtcgggcgccagctgcatggtgcagatcaggggtccctcccttctctctgagcccatgaagacttgcttcactgggggcaatgtgacgcttacatgccaggtgtctggggcctacccccctgccaagatcctgtggctgaggaaccttacccagcccgaggtgatcatccagcctagcagccgccatctcattacccaggatggccagaactccaccctcactatccacaactgctcccaggacctggatgagggctactacatctgccgagctgacagccctgtaggggtgagggagatggaaatctggctgagtgtgaaagaacctttaaatatcggggggattgtgggaaccattgtgagcctccttctgctgggactggccattatctcagggcttctgttgcattatagccctgtgttctgctggaaaggaaacacttccaggggacaatacatggatgatgtcatggttttggtggattcagaagaggaagaggaggaggaggaggaggaggaggaagatgctgcagtaggggaacaggagggagcacgtgagagagaggagttgccaaaagaaatacctaagcaggaccacattcacagagtgaccgccttggtgaatgggaacatagaacagatgggaaatggattccaggatctacaagatgacagcagtgaggagcaaagtgacattgttcaagaagaagacaggccagtctgaagaagaggatggtccatggttgtcttgctctgaaagcttggagagctacattgaagacgagctcttcattcagctttgactccacctgcacccctggcgggggcttgcactaacaatgtttgggtctcagcaaaaaacaaaaccaagcacacacatctttccttccatgtattgaaaaacattggtttgatttgctctaagttttcccaatgatgtttaaaagctttgagaaggaaagctgctttggtgtctgaggtgccacttctgctgtgaatcctggctttatccaggttgatctactgtgatagatgctgatttagagggaacagaggtcagggaagcacaagatggaaaattgcaataacccatgcactgagacttagaaaatcatccttactaggtaaaatgtattatgatgcaataagtgccaactgatatttctcacgttgggactggccaggaactgctgcaaagaaaaataagcagctccttctccattatttacattttaagatgtggtggggggaggttgggagaaattagttctgaggttatcatatgccttttttaaaagataatggaataaagctatttttaagt

SEQ ID NO: 2 - DNA, 1288 bp, Homo sapiens
  CDS (79)..(1242)
ctcgggtggttacgcaccctggaagggaataaacattaggaccatagaggacgctctaggactaatgctcatcagaaaatgactaggagtgctggcatccctatgttcttttttcagatgggaaacattccccccaaggcaaaaacgcccctaagatgtattctggagaattgggaccaatttgaccctcagatgctaagaaagaaactacttatattcttctgcagtactgcctggccacaatatcctcttcaagggggagaaacctggcctcctaagagaagtataaattataacagcatcttacagctagacctcttttgtagaaaggagggcaaatggagtgaagtgccatatgtgcaaactttcttttcattaagagacaactcacaattatgtaaaaagtgtggtttatgccctacaggaagccctcagagtccacctccctaccccagcgtcccccccccgactccttcctcaactaataaggacccccctttaacccaaacggtccaaaaggagatagacaaaggggtaaacaatgaaccaaagagtgccaatattccccgattatgccccctccaagcagtgagaggaggagaattcggcccagccagagtgcctgtacctttttctctctcagacttaaagcaaattaaaatagacctaggtaaattctcagataaccctgacggctatattgatgttttacaagggttaggacaatcctttgatctgacatggagagatataatgttactactaaatcagacactaaccccaaatgagagaagtgccaccataactgcagcccgagagcttggcgatctctggtatctcagtcaggtcaatgataggatgacaacagaggaaagagaacgattccatacaggccagcaggcagttcccagtgcagaccctcattgggacacagaatcagaacatggagattggtgctgcagacatttactaacttgcgtgctggaaggactaaggaaaaccaggaagaaggctgtgaatttttcagtgatgtccactgtaacacagggaaaggaagaaaatcctactgcctttctggagagactaagggaggcactgaggaagcatacctccctgtcacctgactctattgaaggccaactaatcttaaagattaagtttatcactcggtcagctgcagacattagaaaacaaacttcaaaagtccaccttaggcctggagcaaaacttaagacaccctattgaacttggcaacctcggttttttataatagagatcaggaggagca

SEQ ID NO: 3 - DNA, 1676 bp, Homo sapiens
  CDS (1331)..(1549)
  misc_feature (1)...(1676): n = a,t,c or g
tcttttttttttttttttttttttgggtgtggtgatgtatttattcataatatattttcagaacacattaataatggagaataacacttattcatatactgaatataacttttcctggagcactctagagcttgtttggagttggagaatactgccaggcttttcctaatctctttggtctttggaagtgggcagggtttctcaaaccaagtgtcttccatgggccattggcaaaggcttcccttcatcagcttggaggggcagaaagaccatggcttcagcacttccattttggaaagaagtaacaaaaaagtgaattaatgagcaatcggaaagactcaaagcattttgtactccacagttcatttcttcacacaaacgtccattactgcagcgggcatgaaaaccggcagggtgttaggctcatggcctgaagagaagtcacatcaccagccgatgttttcatgcaaaaggcaatcgtgatgattcagaacctggttctgaatttctccaggtgtgctcgtgagctgaaggtcatgcccattctgtgcatcctgtgtctttctactggtaaacttggatgtcattttagagtatcttggcaaaatggtgagaggatctcactttcccaatatcactctgtaatgaagctgcttgggggatcctccatttgattgtggagagaccaaggcaccgtgggctgaagcaacgaatattaacaacactaacaacaataaggataaagtctaagtctcttccaaaaaaggcatatccaaaaataagggtaaagagctggtcttatttcatccaagtgattctgtgcactggaaattgtccttccgttcctccctttcattaaaagtgtttatatttctgagtcggatgatcatttaaatacatacaatattagcaccaaggcagcatatttttttcccagagatcacatgaaactgaatacttatttaacatagttaatagttggtacaatctgtgatatcactaacatacttattggctgatacttgcctagaaatgccaaaaatatcttttatacaactcttatagcaccttgatgatggctagattgttttaaaaaaattcattttaaaaaagtaacaataaaacatttacagatgaaaagtaaacaatagtgtaccgtgataatgaaggatcactttgtcatattactacatgcaaaggcagtcataatagaatcattttacgtacaaaaatattacatcacaataaataatttcaaacataaatattaaactttacatcattaggatagtctacatatctacatacacacatatatgtgtatatatgtatgtgtagatatgtatatatgtatatgtacacacatttacacacacaagcatacaagtcacacacaaacacacacacacatacacatgcacccaaattaaggtggaggtattgcattactatccttcatccatccataatggcttcctcttcaaagcaccttagctataaaactcgcacctccaggccagtaccagaggatggagtgcattttccacagtaaccaccgcatttccctacgactcgggtaccatccggcgacttcttgatgtcagagacagcataattcccttgtgatatccgtctggaattacgcgnctctcgatagtgttcgatgnnggcactct

SEQ ID NO: 4 - DNA, 1289 bp, Homo sapiens
  CDS (40)..(336)
aaaagagacaaattacccagaaacccctcccttccccacatggaggccttggcaaatgttaattttcctagaaaatccttcagacctgaagacgcaggaaaagaatctggctctcagggtggcttctgcgtccccgccgccaggccccagactatggtcacagggccgtcctgttcctccccgggactccagaatttctctcctcaaaggaaagaaaacagggcatgcgcttgttggcaaaacgcagggccggctcccaaaaaccccatgtgtgtacgattaaaagttggccgtccccaggcctcccagcgcaaacttaaagagacagggctttgctgaaaaccaaacatgggccagctgggctttttaacaacctagagactttccggagctgcctggaacagagcctgcgggaaacggggcttgccagagacactcacagtttccttcatggcctgttttggtcccctaagaatctccacatcattgtctttcttgtgccttttccttggtgagcaacagaaagggaagggttccaagcctctaaaaatgtgctttgtgatcaggagtgcgctccaaaccaaatacgcgcgctgccctttcgaggccagtgagctcagcctccaaggctttaaagccacatttcagcaagagaaagcgctgagagctcgcaggttcattaaagaaggcaaagcactggtttctctccttagaaaagtaggtttcttggcttgatgtagactggcttgctttgatttttagtgaagggaatgtacgtaaaacaaaatagggcttggctggtcaaaggagacaagcaggatggatggatggatggatgaatagatagatggtgtttgcatgtaaattgcagagaaaacaaaaccaaagctgattggaaacaattaattgtgggtgtctgagggggaaggtcgcagctttgggcagctttgagaagcggtacaagagctctgtgcctgtgtgtccagccctggagccagccagtgcatttattttaagctcttagaagcaactccttggcccaggaatgcgtgacccctgagatgggtccacgcatctctctacacgtccttctctccgtgggatactggactcgtgcctctgcgcccattctcttctcacgcatatccatgagctttaatttcactttctgatcacggtacgtccataaagccagtattacacttaaatgaagtattcttttttgtaatcgttttttttagaaggtaaacaaatttaataaagctaccaataatgttaaaaaaaaaaaa

SEQ ID NO: 5 - DNA, 2307 bp, Homo sapiens
  CDS (1612)..(2181)
gcaatttcataatatggtaatttttaatattaaaagtaaattgtaaatgtgtctttataaacaatatgcataaaatagatcatattctaaacccttttctttttaaaacgctttttcacagtaaatttcttatggtcagattttccctcagaatagtgcaactggaagaagggaaatgttggcagtggctcaggactctctgctagtacaagtccttgtagatctcctgcaggagcgggtgaagactcatgtctgtctccgtcttcttgatcacctgcagtagctgcacgtgttccgtgacaatctgtctgaggtctgtcattttctggagcagcttggcaaacagctgtgaggactcagggtggttcagcttcagctggagctccagggcttgtagcaggttgtcttgaatgtcttcaatgggcttcacattcagcaaacctgggcggtctccactgagaataatgacagcaataaatattgccaagtcgctgtcatctaattccagtgcattgaacttcacagcaaactcaaacttgggctccataaagtcaccaaaaggctttcgcaggctctttagaaactcccttgtcatgaagccttggccctcggatatgagaaccccatctttattcatcaaggaggccagcattgtgtaaatgatctcgtggactccatatttgaggagagttacttggtcgttcaagtcaagatttacaaaaccaggaatgcttttggcatactctgtgatctcctgcacagcctccacggagcgaaactggcagccctgaaagatgcggatggccacctctttgctctgctcctgcaggggggtgatgtgtttgaacttgattttatcttctcccatcattaaggaattcatgtcatagataacgaatggtgatttgtctgttgtctttcctgtcaagatcgccctcgcctttgctttggtcagcgggaaggactttatgtatgagtcatacaaatgttttgccagggcctgacggaggtcagcggactctggattcagctggtcgatatcactggagatctccgccaacagcttctccttctcggcctgtgcgatccgcccaaacctgatggcattatgagacatccccactgcaaggcatttctgaaaccgacagtactgacatttatttctactttttttgtggatccgacagttaagatcacatctgtcatagataagcttcaatctgattgttctccggaagaaacccttgcatccttcacaagcatgaactccatagtgaaatccagaagctttatctccacagacacgacattcaattgccatgagggagttggaaggctcttcatgaggcttattgtagagctgagtcttctcagaataataaggtggagatgcaggctccactttgattgcactttggtactcttgaagtttcaggtcatacttgtaatctgcaaccactggatctgttcttgtgaatggaatgtcttcgtaatgtggagtagaaatgctggagaagtcaacagtagtgaagggcttgatatcaaaggagtgggagtggtcttccattacggagagatccacggagctgatcccaaagttggtgggccagaatgcgatctctgtgtcaaccatggtcatttctgcggccacggcggcgtggcgcccctctccggtgtcctcgaggccgacccaagccccccaggcggcggctgcggctcgggctcgggaattcccagactcagagagaacccaccatggtgctgtctcctgccgacaagaccaacgtcaaggccgcctggggtaaggtcggcgcgcacgctggcgagtatggtgcggaggccctggagaggatgttcctgtccttccccaccaccaagacctacttcccgcacttcgacctgagccacggctctgcccaggttaagggccacggcaagaaggtggccgacgcgctgaccaacgccgtggcgcacgtggacgacatgcccaacgcgctgtccgccctgagcgacctgcacgcgcacaagcttcgggtggacccggtcaacttcaagctcctaagccactgcctgctggtgaccctggccgcccacctccccgccgagttcacccctgcggtgcacgcctccctggacaagttcctggcttctgtgagcaccgtgctgacctccaaataccgttaagctggagcctcggtggccatgcttcttgccccttgggcctccccccagcccctcctccccttcctgcacccgtacccccgtggtctttgaataaagtctgagtgggcggcaaaaaaaaaaaaa

SEQ ID NO: 6 - DNA, 912 bp, Homo sapiens
  CDS (3)..(866)
ggatgtccaggctgcgggcgctgctgggcctcgggctgctggttgcgggctcgcgcctgccgcggatcaaaagccagaccatcgcctgtcgctcgggacccacctggtggggaccgcagcggctgaactcgggtggccgctgggactcagaggtcatggcgagcacggtggtgaagtacctgagccaggaggaggcccaggccgtggaccaggagctatttaacgaataccagttcagcgtggaccaacttatggaactggccgggctgagctgtgctacagccatcgccaaggcatatccccccacgtccatgtccaggagcccccctactgtcctggtcatctgtggcccggggaataatggaggagatggtctggtctgtgctcgacacctcaaactctttggctacgagccaaccatctattaccccaaaaggcctaacaagcccctcttcactgcattggtgacccagtgtcagaaaatggacatccctttccttggggaaatgcccgcagagcccatgacgattgatgaactgtatgagctggtggtggatgccatctttggcttcagcttcaagggcgatgttcgggaaccgttccacagcatcctgagtgtcctgaagggactcactgtgcccattgccagcatcgacattccctcaggatgggacgtggagaagggaaatgctggagggatccagccagacttgctcatctccctcacagcccccaaaaaatctgcaacccagtttaccggtcgctaccattacctggggggtcgttttgtgccacctgctctggaaaagaagtaccagctgaacctgccaccctaccctgacactgagtgtgtctatcgtctgcagtgagggaaggtgggtgggtattctccccaataaagacttagagccc

SEQ ID NO: 7 - DNA, 1949 bp, Homo sapiens
  CDS (1441)..(1776)
tttttttttttttttaaaaattactcttttacttttattacaataaataattatcaataatagaattaaacaattttcaattaaaacctactgcattactttggggtttcacagcagcagaaacaaacataaatccagttgaaagggcaaggcttccagaatccagtgacaagaaacagtctggtcttgattattcgggctagcaatgggaaacactgatacagataatgcaaaaacaatgaaatgcatcggcatactctctttgtacatcacattatctgacactttaaaatattccagctaagtaatttaagcaagccatgaagctctgtttctgcaacagttagagttctcccccagcaagcccgcagcacaactgctcccagagccaccctctggccagaaacgggccccatcatcatgcagacctagaagcctccaccctggtggaagcagccatctttctcaaagctctttctggctcacacaacccatggttaaaggaaaatgggaaagtgacatatttaaagggcctttctcgaggactgagatgaactggaagacagacagactgtggctccagatcaggaagaggcttcagagtaagggccacatgcagatgaactccacatgaagaaactatctgataaaggctgaccattttgctgataatcaagcagactgcatgtatatatgaatatatcatacatacatatgtagtgaatatatgtgtacatattaaataggcatacacacacatcacacacaaccagataaaataaatggtacatacattgctactatgaacactgcacgtcccagacagaccaatgactaatatgttcaattaaactacttgaattaaactactcttcctctccccaaaatattctgcttgcagcaaacatattccagttgctcaagcggtgttgtttctaggttcctgagaaggaatggaatcgtcctcttgtttcagaacactacagaaagccaactgcaacaggaccaagctaaacaattcatatttgatttggccatgattcctccacctattcttagtcacagggcatgaaaccttactcagaaagatatcaatttctttttctacaactggctacaaatttactgtattatgttagatggaggggactgggggaaggcgggcagcagggagtttacatgttggcaatcattcattgcctttccctttacccagagaaaatgctactttaaaaaaaaaaacacccagaaatttagagttcaataatgaattttgctttcttggcacatttttgaaatgatcatatcattacatgtagctaggtctttatctcctgaatgctcctctagggaggcaagttatctaaacaacaaaataacctacaaaaaaagttaatattgtgagcagtctcaatttgtagttattaaactcaaagtctaatgctgaaaggcaacagtaatttaaacagatttgtttatttttattattattttttgagatggagtcttgctctgtcactctggctggagtgcagtggcacaatctccgctcactgcaatctccatctcccaggttcaagtgattctcctgcctcagcctccccagtaactgggattacaggcacatgccaccatgcccagctaatttttttgtatttttattacagacggggtttcgccatgttgctcaggttggtgtcgaactcctgggctcaagcaatccacctgccttggcttcccaaagtgctgggattacaggcacctgccccagatttataatgctattcacagatcttgcagaattataacaggctccttctacaacttggttagtgacatcaagtactaactatatatgttccaggtcaagaacttactcttgagatattcaaaaagtgcttgtcaagaatatcaggaatctagaatttatggcaaattgtatatatttt

SEQ ID NO: 8 - DNA, 1225 bp, Homo sapiens
  CDS (90)..(1172)
aaggatccttaattaaattaatcccccccccccggtgagccgcaacctttccaagggagtggttgtgtgatcgccatcttagggaaaagatgttctcgtccgtggcgcacctggcgcgggcgaaccccttcaacacgccacatctgcagctggtgcacgatggtctcggggacctccgcagcagctccccagggcccacgggccagccccgccgccctcgcaacctggcagccgccgccgtggaagagtacagttgtgaatttggctccgcgaagtattatgcactgtgtggctttggtggggtcttaagttgtggtctgacacacactgctgtggttcccctggatttagtgaaatgccgtatgcaggtggacccccaaaagtacaagggcatatttaacggattctcagttacacttaaagaggatggtgttcgtggtttggctaaaggatgggctccgactttccttggctactccatgcagggactctgcaagtttggcttttatgaagtctttaaagtcttgtatagcaatatgcttggagaggagaatacttatctctggcgcacatcactatatttggctgcctctgccagtgctgaattctttgctgacattgccctggctcctatggaagctgctaaggttcgaattcaaacccagccaggttatgccaacactttgagggatgcagctcccaaaatgtataaggaagaaggcctaaaagcattctacaagggggttgctcctctctggatgagacagataccatacaccatgatgaagttcgcctgctttgaacgtactgttgaagcactgtacaagtttgtggttcctaagccccgcagtgaatgttcaaagccagagcagctggttgtaacatttgtagcaggttacatagctggagtcttttgtgcaattgtttctcaccctgctgattctgtggtatctgtgttgaataaagaaaaaggtagcagtgcttctctggtcctcaagagacttggatttaaaggtgtatggaagggactgtttgcccgtatcatcatgattggtaccctgactgcactacagtggtttatctatgactccgtgaaggtctacttcagacttcctcgccctcctccacccgagatgccagagtctctgaagaagaagcttgggttaactcagtagttagatcaaagcaaatgtggactgaatctgcttgttgatcagtgttgaag

SEQ ID NO: 9 - DNA, 894 bp, Homo sapiens
  CDS (364)..(600)
cagattctttgtcctactgaccaaattcccccaagttcagaatttgcagattttatagcaggtggtattcttttccaaagatatcttgcattattcatgtcattatggagcaaatataaagttagaagctgaccataccctgggggtgtagcaattcctccaggggcctcgagctcctggttctcgcactgatccagcaactttttgaaactaaaggcgctttccgccatcaccgccactggcatcttcgcggccggcctcgccgttgcaccgtccggacagccaaacctgggctggacgtggttttgtctgctgcgcccgctcttcgcgctctcgtttcattttctgcagcgcgccagcaggatggcccacaagcagatctactactcggacaagtacttcgacgaacactacgagtaccggcatgttatgttacccagagaactttccaaacaagtacctaaaactcatctgatgtctgaagaggagtggaggagacttggtgtccaacagagtctaggctgggttcattacatgattcatgagccagaaccacatattcttctctttagacgacctcttccaaaagatcaacaaaaatgaagtttatctggggatcgtcaaatctttttcaaatttaatgtatatgtgtatataaggtagtattcagtgaatacttgagaaatgtacaaatctttcatccatacctgtgcatgagctgtattcttcacagcaacagagctcagttaaatgcaactgcaagtaggttactgtaagatgtttaagataaaagttcttccagtcagtttttctcttaagtgcctgtttgagtttactgaaacagtttacttttgttcaataaagtttgtatgttgcatttaaaaaaaaaaaaaa

SEQ ID NO: 10 - DNA, 2248 bp, Homo sapiens
  CDS (190)..(924)
aaggatccttaattaaattaatcccccccccccccccccgagctaaagccaaaagcagatcaaagtggtgggactcgcgtcgcggccgcggagacgtgaagctctcgatgctcctcccgctgcgggtcggcgctcgccctcgctctcctcgccctccgccccggccccggccccggccccgcgcccgccatggagaagactgagctgatccagaaggccaagctggccgagcaggccgagcgctacgacgacatggccacctgcatgaaggcagtgaccgagcagggcgccgagctgtccaacgaggagcgcaacctgctctccgtggcctacaagaacgtggtcgggggccgcaggtccgcctggagggtcatctctagcatcgagcagaagaccgacacctccgacaagaagttgcagctgattaaggactatcgggagaaagtggagtccgagctgagatccatctgcaccacggtgctggaattgttggataaatatttaatagccaatgcaactaatccagagagtaaggtcttctatctgaaaatgaagggtgattacttccggtaccttgctgaagttgcgtgtggtgatgatcgaaaacaaacgatagataattcccaaggagcttaccaagaggcatttgatataagcaagaaagagatgcaacccacacacccaatccgcctggggcttgctcttaacttttctgtattttactatgagattcttaataacccagagcttgcctgcacgctggctaaaacggcttttgatgaggccattgctgaacttgatacactgaatgaagactcatacaaagacagcaccctcatcatgcagttgcttagagacaacctaacactttggacatcagacagtgcaggagaagaatgtgatgcggcagaaggggctgaaaactaaatccatacagggtgtcatccttctttccttcaagaaacctttttacacatctccattccttattccacttggatttcctatagcaaagaaacccattcatgtgtatggaatcaactgtttatagtcttttcacactgcagctttgggaaaacttcattccttgatttgtgtttgtcttggccttcctggtgtgcagtactgctgtagaaaagtattaatagcttcatttcatataaacataagtaactcccaaacacttatgtagaggactaaaaatgtatctggtatttaagtaatctgaaccagttctgcaagtgactgtgttttgtattactgtgaaaataagaaaatgtagttaattacaatttaaagagtattccacataacttcttaatttctacattccctcccttactcttcgggggtttcctttcagtaagcaacttttccatgctcttaatgtattcctttttagtaggaatccggaagtattagattgaatggaaaagcacttgccatctctgtctaggggtcacaaattgaaatggctcctgtatcacatacggaggtcttgtgtatctgtggcaacagggagtttccttattcactctttatttgctgctgtttaagttgccaacctcccctcccaataaaaattcacttacacctcctgcctttgtagttctggtattcactttactatgtgatagaagtagcatgttgctgccagaatacaagcattgcttttggcaaattaaagtgcatgtcatttcttaatacactagaaaggggaaataaattaaagtacacaagtccaagtctaaaactttagtacttttccatgcagatttgtgcacatgtgagagggtgtccagtttgtctagtgattgttatttagagagttggaccactattgtgtgttgctaatcattgactgtagtcccaaaaaagccttgtgaaaatgttatgccctatgtaacagcagagtaacataaaataaaagtacattttataaaccatttactatggctttgtaacaattgcatacccatattttaagggacaggtgaatttactactttctaaagtttattgatacttcccttttatgtaaaatgtagtagtgatacctatatttccacattgtgcattgtgacacacttgtctagggatgcctggaagtgtataaaattggactgcatttcttagagtgttttactatagatcagtctcatgggccatctcttcctcagatgtaaatgatatctggttaagtgttatatggaataaagtggacattttaaaactaaaaaaaaaaaaa

SEQ ID NO: 11 - DNA, 1655 bp, Homo sapiens
  CDS (382)..(1479)
tgattctgactgaatacaggccctggacccttccctcaagtctcaccagttctgctctcccatcaagcttcagatgccatgttgtactgggggaatgtagcccttgtgctccccaccccctacctccacctgagcctcaccctgctgttgagccctgagtggctaggggaaatgggaagaggattgccatggcctggccatcttgttgctgcttggttagatcatatagctaatgaattaggcaggggagctattttttgaagatgatgaactaaatgttgaagacaagtttgagatctgtaaaattttttggctttcacccccaaccagtgaccaaagacttgaccactcaaagtccagctccccagaacactgctcgacatggacaccggtgtgattgaaggtggattaaatgtcactctcaccatccggctacttatgcatggaaaggaagttggcagtatcatcggaaagaaaggagaatcagttaagaagatgcgcgaggagagtggtgcacgtatcaacatctcagaagggaattgtcctgagagaattatcactttggctggacccactaatgccatcttcaaagcctttgctatgatcattgacaaactggaagaggacataagcagctctatgaccaatagcacagctgccagtagacccccggtcaccctgaggctggtggtccctgctagtcagtgtggctctctcattggaaaaggtggatgcaagatcaaggaaatacgagagagtacaggggctcaggtccaggtggcaggggatatgctacccaactcaactgagcgggccatcactattgctggcattccacaatccatcattgagtgtgtcaaacagatctgcgtggtcatgttggagactctctcccagtcccccccgaagggcgtgaccatcccgtaccggcccaagccgtccagctctccggtcatctttgcaggtggtcaggacaggtacagcacaggcagcgacagtgcgagctttccccacaccaccccgtccatgtgcctcaaccctgacctggagggaccacctctagaggcctataccattcaaggacagtatgccattccacagccagatttgaccaagctgcaccagttggcaatgcaacagtctcattttcccatgacgcatggcaacaccggattcagtggcattgaatccagctctccagaggtgaaaggctattgggcaggtttggatgcatctgctcagactacttctcatgaactcaccattccaaacgatttgattggctgcataatcgggcgtcaaggcgccaaaatcaatgagatccgtcagatgtctggggcgcagatcaaaattgcgaacccagtggaaggatctactgataggcaggttaccatcactggatctgctgccagcattagcctggctcaatatctaatcaatgtcaggctttcctcggagacgggtggcatggggagcagctagaacaatgcagattcatccataatccctttctgctgttcaccaccacccatgatccatctgtgtagtttctgaacagtcagcgattccaggttttaaatagtttgtaaattttcagtttctacacactttatcatccactcgtgattttttaattaaagcgttttaattccttt

SEQ ID NO: 12 - DNA, 794 bp, Homo sapiens
  CDS (230)..(748)
caaagttgtcatgaatactgacttgggcgtgggacccatccgagatgtgctggaccacatctacagtgcgctgtatgtggagctggtggtgaagaatcccctgtgcccgctgggccaaactgtgcaaagtgagctctttcgctcccgactggactcctatgttcgctctctgcccttcttctccgcccgggctggctgaagcaacctacctcaagtctcaggagaattcatgtctgcctggggcccttccgggaacccgagcccaaggagtgggggcggccccggagcgaggctcacactccctgccctgcagatgactgtccacaacctgtacctgtttgaccggaatggagtgtgtctgcactacagcgaatggcaccgcaagaagcaagcagggattcccaaggaggaggagtataagctgatgtacgggatgctcttctctatccgctcgtttgtcagcaagatgtccccgctagacatgaaggatggcttcctggccttccaaactagccgttacaaactccattactacgagacgcccactgggatcaaagttgtcatgaatactgacttgggcgtgggacccatccgagatgtgctgcaccacatctacagtgcgctgtatgtggagctggtggtgaagaatcccctgtgcccgctgggccaaactgtgcaaagtgagctctttcgctcccgactggactcctatgttcgctctctgcccttcttctccgcccgggctggctgaagcaacctacctcaagtctcaggagaattcatgtctgcctggg

SEQ ID NO: 13 - DNA, 709 bp, Homo sapiens
  CDS (85)..(528)
aaggatccttaattaaattaatcccccccccccgctctagcagctgccgctgagccgccggacggacgctcgtcttcgcccgccatggccgagagcgactgggacacggtgacggtgctgcgcaagaagggccctacggccgcccaggccaaatccaagcaggctatcttagcggcacagagacgaggagaagatgtggagacttccaagaaatgggctgctggccagaacaaacaacattctattaccaagaacacggccaagctggaccgggagacagaggagctgcaccatgacagggtgaccctggaggtgggcaaggtgatccagcaaggtcggcagagcaaggggcttacgcagaaggacctggccacgaaaatcaatgagaagccacaggtgatcgcggactatgagagcggacgggccatacccaataaccaggtgcttggcaaaatcgagcgggccattggcctcaagctccggggaaaggacattggaaagcccatcgagaaggggcctagggcgaaatgaacacaaagcctcgaaatcagtgcgctccagctgatctcgttccgccggttccccttggccgccagttccgttctcctcacgggccgaacggaacaaggggtccagcttgcgggggaccctccccagcccattcctgctgtcaaacaaacaaaaccttgcaaagcgaaaaaaaaaaaaa

SEQ ID NO: 14 - DNA, 627 bp, Homo sapiens
  CDS (11)..(349)
cggggctggcatgaccccgggggtcttccatgccagtccgcctcagtcgcagagggtccctcggcaagcgccctgtgagtgggccattcggaacattggacagaagcccaaagagccaaattgtcacaattgtggaacccacattggcctgagatccaaaacgcttcgaggcaccccaaattacctgcccattcgtcaggacacccacccacccagtgttatattctgcctcgccggagtgggtgttcccgggggcacttgccgaccagccccttgcgtccccaggtttgcagctctcccctgggccactaaccatcctggcccgggctgcctgtctgacctccgtgcctagtcgtggctctccatcttgtctcctccccgtgtccccaatgtcttcagtggggggcccctcttgggtcccctcctctgccatcacctgaagacccccacgccaaacactgaatgtcacctgtgcctgccgcctcggtccaccttgcggcccgtgtttgactcaactcagctcctttaacgctaatatttccggcaaaatcccatgcttgggttttgtctttaaccttgtaacgcttgcaatcccaataaagcattaaaagtcatgaaaaaaaaaaa

SEQ ID NO: 15 - DNA, 325 bp, Homo sapiens
  CDS (86)..(268)
ggctgttggggtccaccacgccttccacctgccccactgcttcttcgcttctctcttggaaagtccagtctctcctcggcttgcaatggaccccaactgctcctgcgccgctggtgtctcctgcacctgcgctggttcctgcaagtgcaaagagtgcaaatgcacctcctgcaagaagagctgctgctcctgctgccccgtgggctgtagcaagtgtgcccagggctgtgtttgcaaaggggcgtcagagaagtgcagctgctgcgactgatgccaggacaacctttctcccagatgtaaacagagagacatgtacaaacctgga

SEQ ID NO: 16 - DNA, 791 bp, Homo sapiens
  CDS (223)..(738)
cggaggtgtctaccccgccggtgatggcgttgaacgccactggcttcccggccttccgtccgctgcctccgtccgattctgcgtctgcttgctgaggaggcggattaggggggcgcggagtctcttcccttgagtgcataggtcccggttggtagagggtttgagtccgcatcgccacagctgaaggctgcgagggactaagagcagaatatatctttagaaatgagttgcacaattgagaaggcacttgccgacgctaaagctcttgttgaaagattaagagatcatgacgatgcagcagaatctctgattgagcaaaccacagctctcaacaagcgagtagaagccatgaaacagtatcaggaagaaattcaagaacttaatgaagtcgcgagacatcggccacggtccacgttagttatgggaatccagcaagaaaacagacaaatcagagagttgcaacaagaaaacaaagaattacgtacatctctggaagaacatcagtcggccttggaacttataatgagcaagtaccgagaacaaatgtttagattgctaatggctagcaaaaaagatgatccgggtataataatgaagttaaaagagcagcactccaagattgacatggtacatcgtaacaagtccgaaggattcttccttgatgcatctcgacacatccttgaagcacctcaacatggactggagagaaggcacttggaagcaaatcagaatgtacactaaataaacagtcaacttttggggtgtggatggaaggggggtccattttaaaa

SEQ ID NO: 17 - DNA, 1297 bp, Homo sapiens
  CDS (223)..(1251)
taagcttgcggccgcccgcgagcggggcggtgccacgtacggctccggaagaagcgacggaatctgctagggcacaagagagacgggcgctcgggctctcgcagtcctcttccgtcagtgtcttttgcttcgactcccggcggagcgcgcaacgtggagtgacgtgcaggggccaagtgcaacccaggcagccacggctgtttcggagctcaggactctaaaatggcagagcagctttctccaggaaaggcggtggatcaggtgtgcaccttccttttcaaaaagcctgggcggaaaggggctgctggacgcagaaagcgcccggcctgcgacccagagcccggagaaagcggcagcagtagcgacgaaggctgcactgtggttcgaccggaaaagaagcgggtgacccacaatccaatgatacagaagacccgtgacagtggtaaacagaaggcggcttacggcgacttgagcagcgaagaggaagaggaaaatgagcccgagagtctcggcgtggtttataaatccacccgttcggcgaaacccgtgggaccagaggatatgggagcgacagctgtctatgagctggacacagagaaagagcgcgatgcacaagccatctttgagcgcagccagaagatccaggaggagctgaggggcaaggaggatgacaagatctatcggggaatcaacaattatcagaaatacatgaagcccaaggatacgtctatgggcaatgcctcttccgggatggtgaggaagggccccatccgagcgcccgagcatctacgtgccaccgtgcgctgggattaccagcccgacatctgtaaggactacaaagagactggcttctgcggcttcggagacagctgcaaattcctccatgaccgttcagattacaagcatgggtggcagatcgaacgtgagcttgatgagggtcgctatggtgtctatgaggatgaaaactatgaagtgggaagcgatgatgaggaaataccattcaagtgtttcatctgtcgccagagcttccaaaacccagttgtcaccaagtgcaggcattatttctgcgagagctgtgcactgcagcatttccgcaccaccccgcgctgctatgtctgtgaccagcagaccaatggcgtcttcaatccagcgaaagaattgattgctaaactagagaagcatcgagctacaggagagggtggtgcttccgacttgccagaagaccccgatgaggatgcaattcccattacttaggtttcccataattcttaaatttaaaaaataaacgttttgttct

SEQ ID NO: 18 - DNA, 1454 bp, Homo sapiens
  CDS (16)..(1401)
cctctgcagctcagcatggctagggtactgggagcacccgttgcactggggttgtggagcctatgctggtctctggccattgccacccctcttcctccgactagtgcccatgggaatgttgctgaaggcgagaccaagccagacccagacgtgactgaacgctgctcagatggctggagctttgatgctaccaccctggatgacaatggaaccatgctgttttttaaaggggagtttgtgtggaagagtcacaaatgggaccgggagttaatctcagagagatggaagaatttccccagccctgtggatgctgcattccgtcaaggtcacaacagtgtctttctgatcaagggggacaaagtctgggtataccctcctgaaaagaaggagaaaggatacccaaagttgctccaagatgaatttcctggaatcccatccccactggatgcagctgtggaatgtcaccgtggagaatgtcaagctgaaggcgtcctcttcttccaaggtgaccgcgagtggttctgggacttggctacgggaaccatgaaggagcgttcctggccagctgttgggaactgctcctctgccctgagatggctgggccgctactactgcttccagggtaaccaattcctgcgcttcgaccctgtcaggggagaggtgcctcccaggtacccgcgggatgtccgagactacttcatgccctgccctggcagaggccatggacacaggaatgggactggccatgggaacagtacccaccatggccctgagtatatgcgctgtagcccacatctagtcttgtctgcactgacgtctgacaaccatggtgccacctatgccttcagtgggacccactactggcgtctggacaccagccgggatggctggcatagctggcccattgctcatcagtggccccagggtccttcagcagtggatgctgccttttcctgggaagaaaaactctatctggtccagggcacccaggtatatgtcttcctgacaaagggaggctataccctagtaagcggttatccgaagcggctggagaaggaagtcgggacccctcatgggattatcctggactctgtggatgcggcctttatctgccctgggtcttctcggctccatatcatggcaggacggcggctgtggtggctggacctgaagtcaggagcccaagccacgtggacagagcttccttggccccatgagaaggtagacggagccttgtgtatggaaaagtcccttggccctaactcatgttccgccaatggtcccggcttgtacctcatccatggtcccaatttgtactgctacagtgatgtggagaaactgaatgcagccaaggcccttccgcaaccccagaatgtgaccagtctcctgggctgcactcactgaggggccttctgacatgagtctggcctggccccacctcctagttcctcata

SEQ ID NO: 19 - DNA, 1764 bp, Homo sapiens
  CDS (203)..(1042)
gatttgctctgccagcagctgtcggtgccgcgctcgacaccgagtcctagctaggcgctcacagaatacgcgctccctccctcccccttctctgtcccccgcctctcgctcaccccggcccactccagcggcgactttgagggattccctctctggcggcctctgcagcagcacagccggcctcattcggggcactgcgagtatggatctccaaggaagaggggtccccagcatcgacagacttcgagttctcctgatgttgttccatacaatggctcaaatcatggcagaacaagaagtggaaaatctctcaggcctttccactaaccctgaaaaagatatatttgtggtgcgggaaaatgggacgacgtgtctcatggcagagtttgcagccaaatttattgtaccttatgatgtgtgggccagcaactacgtagatctgatcacagaacaggccgatatcgcattgacccggggagctgaggtgaagggccgctgtggccacagccagtcggagctgcaagtgttctgggtggatcgcgcatatgcactcaaaatgctctttgtaaaggaaagccacaacatgtccaagggacctgaggcgacttggaggctgagcaaagtgcagtttgtctacgactcctcggagaaaacccacttcaaagacgcagtcagtgctgggaagcacacagccaactcgcaccacctctctgccttggtcacccccgctgggaagtcctatgagtgtcaagctcaacaaaccatttcactggcctctagtgatccgcagaagacggtcaccatgatcctgtctgcggtccacatccaaccttttgacattatctcagattttgtcttcagtgaagagcataaatgcccagtggatgagcgggagcaactggaagaaaccttgcccctgattttggggctcatcttgggcctcgtcatcatggtaacactcgcgatttaccacgtccaccacaaaatgactgccaaccaggtgcagatccctcgggacagatcccagtataagcacatgggctagaggccgttaggcaggcaccccctattcctgctcccccaactggatcaggtagaacaacaaaagcacttttccatcttgtacacgagatacaccaacatagctacaatcaaacaggcctgggtatctgaggcttgcttggcttgtgtccatgcttaaacccacggaagggggagactctttcggatttgtagggtgaaatggcaattattctctccatgctggggaggaggggaggagggtctcagacagctttcgtgctcatggtggcttggctttgactctccaaagagcaataaatgccacttggagctgtatctggccccaaagtttagggattgaaaacatgcttctttgaggaggaaacccctttaggttcagaagaatatggggtgctttgctcccttggacacagctggcttatcctatacagttgtcaatgcacacagaatacaacctcatgctccctgcagcaagacccctgaaagtgattcatgcttctggctggcattctgcatgtttagtgattgtcttgggaatgtttcactgctacccgcatccagcgactgcagcaccagaaaacgactaatgtaactatgcagagttgtttggacttcttcctgtgccaggtccaagtcgggggacctgaagaatcaatctgtgtgagtctgtttttcaaaatgaaataaaacacactattctctggcaaaaaaaaaaaaaaa

SEQ ID NO: 20 - DNA, 1872 bp, Homo sapiens
  CDS (232)..(1713)
ttggacactagtgcagaaatatgtcccgagagcaaaatagagaggccacaagtgacagaaagattttacacatacatgtgcgagatacaaaaacagtgaaggatgtacagaagccaaaaaatgtgaacaagacagctgaaaaagttagaattataaaatatttgttgggagagctcatggcccctggtagcagaacaagagatttcagaaattcagaggttgattacagaaatggaggcatgtatatctgtacttccaacagtaagtggaaacacagatattcaagttgagatagcactggccatgcaaccattaagaagtgagaatgctcagttacgaaggcagttgagaattttgaaccagcaactcagagaacaacagaaaactcaaaaaccatctggtgctgtggattgcaaccttgaattgttttctcttcagtcattgaatatgtcactgcaaaatcaattggaggagtcactaaagagccaggaattactgcagagtaaaaatgaagagctgttaaaagtgattgaaaatcagaaagatgaaaacaaaaaatttagtagtatatttaaagacaaagatcaaactatacttgaaaataaacagcaatatgatattgagataacaagaataaaaattgaattggaggaagccctagtcaatgtgaaaagctcccagtttaagttagaaactgctgaaaaggaaaaccagatattggggataacattacgtcagcgtgatgctgaggtgactcgactaagagaattaaccagaactttacagactagcatggcaaagcttctctccgatcttagtgtggacagtgctcgctgcaagcctgggaataaccttaccaaatcactcttgaacattcatgataaacaacttcaacatgacccagctcctgctcacacttccataatgagctatctaaataagttagaaacaaattacagttttacacattcagagccactttctacaattaaaaatgaggaaaccatagagccagacaaaacctatgaaaatgttctgtcctccagaggccctcaaaatagtaacactaggggcatggaggaagcatctgcacctggaattatttctgccctttcaaaacaggattctgatgaagggagtgaaactatggctttaatagaagatgagcataatttggataatacaatttacattccttttgctagaagcactcctgaaaagaaatcaccactttctaagagactatcccctcagccacaaataagagcagctacaacacagctagtcagcaacagtggacttgctgtctctggaaaagaaaataaactgtgtacacctgtaatctgttcctcttcaacaaaggaagcagaagatgcacctgaaaaactttccagagcatctgatatgaaggacacacagctcctcaagaaaataaaggaagcaattggtaagatccctgctgccaccaaggagccagaggaacaaactgcatgtcatggcccatcaggttgtcttagcaacagccttcaagtgaaaggcaatactgtctgtgatggtagtgttttcacttctgacttgatgtctgactggagcatctcttcgttttcaacgttcacttctcgtgatgaacaagacttcagaaatggccttgcggcattagatgccaacatagctagactccagaagtctttaaggactggtcttctggagaaatgaattcagaagaaaattcatcaggtgcttctttttaaaactagaacttggctatattgaatgtgtatttttctttagtgaaatgatgttttatgttattatgtgtgaagtaatatattgtacaagtaataaatgtattgttgagataaaaaaaaaaaa

SEQ ID NO: 21 - DNA, 877 bp, Homo sapiens
  CDS (21)..(797)
gaggcctggaggacaccaacatgaacaagttgaaatcatcgcagaaggataaagttcgtcagtttatgatcttcacacaatctagtgaaaaaacagcagtaagttgtctttctcaaaatgactggaagttagatgttgcaacagataattttttccaaaatcctgaactttatatacgagagagtgtaaaaggatcattggacaggaagaagttagaacagctgtacaatagatacaaagaccctcaagatgagaataaaattggaatagatggcatacagcagttctgtgatgacctggcactcgatccagccagcattagtgtgttgattattgcatggaagttcagagcagcaacacagtgcgagttctccaaacaggagttcatggatggcatgacagaattaggatgtgacagcatagaaaaactaaaggcccagatacccaagatggaacaagaattgaaagaaccaggacgatttaaggatttttaccagtttacttttaattttgcaaagaatccaggacaaaaaggattagatctagaaatggccattgcctactggaacttagtgcttaatggaagatttaaattcttagacttatggaataaatttttgttggaacatcataaacgatcaataccaaaagacacttggaatcttcttttagacttcagtacgatgattgcagatgacatgtctaattatgatgaagaaggagcatggcctgttcttattgatgactttgtggaatttgcacgccctcaaattgctgggacaaaaagtacaacagtgtagcactaaaggaaccttctagaatgtacatagtctgtacaataaatacaacagaaaattgcacagtcaaaaaaaaaaaa

SEQ ID NO: 22 - DNA, 993 bp, Homo sapiens
  CDS (301)..(879)
ggcctgcaatccctcggcgcggggcaggttccgggctgcttaggttggcaccggtccgtggtccccgggggcgcagtcgcagcgctcccgccctccaggcgtcagcgagtgcgcggtccagtgcggccggaacctggcgcaactcctagagcggtccttggggagacgcgggtcccagtcctgcggctcctactggggagtgcgctggtcggaagattgctggactcgctgaagagagactacgcaggaaagccccagccacccatcaaatcagagagaaggaatccaccttcttacgctatggcaggtaagaaagtactcattgtctatgcacaccaggaacccaagtctttcaacggatccttgaagaatgtggctgtagatgaactgagcaggcagggctgcaccgtcacagtgtctgatttgtatgccatgaaccttgagccgagggccacagacaaagatatcactggtactctttctaatcctgaggttttcaattatggagtggaaacccacgaagcctacaagcaaaggtctctggctagcgacatcactgatgagcagaaaaaggttcgggaggctgacctagtgatatttcagggtaaactagcgctcctttccgtaaccacgggaggcacggccgagatgtacacgaagacaggagtcaatggagattctcgatacttcctgtggccactccagcatggcacattacacttctgtggatttaaagtccttgcccctcagatcagctttgctcctgaaattgcatccgaagaagaaagaaaggggatggtggctgcgtggtcccagaggctgcagaccatctggaaggaagagcccatcccctgcacagcccactggcacttcgggcaataactctgtggcacgtgggcatcacgtaagcagcacactaggaggcccaggcgcaggcaaagagaagatggtgctgtcatgaaataaaattacaacatagctaaaaaaaaaaaa

SEQ ID NO: 23 - DNA, 2076 bp, Homo sapiens
  CDS (491)..(1666)
cgaacctggcttcgctaacgccctcccagctccctcgggcctgacttccggtttcctcgcgcgtccctggcgccgagcccgcggacagcggcagccccttttccggctgagagctcatccacacttccaatcactttccggagtgcttcccctccctccggcccgtgctggtcccgacggcgggcctgggtctcgcgcgcgtattgctgggtaacgggccttctcccgcgtcggcccggcccctcctgcctcggctcgtccctccttccagaacgtcccgggctcctgccgagtcagaagaaatgggactccctccgcgacgtgcccggagcagctcccttcgctgtggaagcggcggtgtcttcgaagaaaccggaagcccgtggtgacccctggcgacccggtttgttttcggtccgtttccaaacactaaggaatcgaaactcggcggccttgggggcggccctacgtagcctggcttctggttgtcatggatgcactggtagaagatgatatctgtattctgaatcatgaaaaagcccataagagagatacagtgactccagtttcaatatattcaggagatgaatctgttgcttcccattttgctcttgtcactgcatatgaagacatcaaaaaacgacttaaggattcagagaaagagaactctttgttaaagaagagaataagatttttggaagaaaagctaatagctcgatttgaagaagaaacaagttccgtgggacgagaacaagtaaataaggcctatcatgcatatcgagaggtttgcattgatagagataatttgaagagcaaactggacaaaatgaataaagacaactctgaatctttgaaagtattgaatgagcagctacaatctaaagaagtagaactcctccagctgaggacagaggtggaaactcagcaggtgatgaggaatttaaatccaccttcatcaaactgggaggtggaaaagttgagctgtgacctgaagatccatggtttggaacaagagctggaactgatgaggaaagaatgtagcgatctcaaaatagaactacagaaagccaaacaaacggatccatatcaggaagacaatctgaagagcagagatctccaaaaactaagcatttcaagtgataatatgcagcatgcatactgggaactgaagagagaaatgtctaatttacatctggtgactcaagtacaagctgaactactaagaaaactgaaaacctcaactgcaatcaagaaagcctgtgcccctgtaggatgcagtgaagaccttggaagagacagcacaaaactgcacttgatgaattttactgcaacatacacaagacatccccctctcttaccaaatggcaaagctctttgtcataccacatcttcccctttaccaggagatgtaaaggttttatcagagaaagcaatcctccaatcatggacagacaatgagagatccattcctaatgatggtacatgctttcaggaacacagttcttatggcagaaattctctggaagacaattcctgggtatttccaagtcctcctaaatcaagtgagacagcatttggggaaactaaaactaaaactttgcctttacccaaccttccaccactgcattacttggatcaacataatcagaactgcctttataagaattaatttggaagagattcacgatttcaccatgaggacacttatctctttcagtggtcctcccaagaaattatttaacaaactgaaaggagattttgattaaaattttgcagaggtcttcagtatctatatttgaacacactgtacaatagtacaaaaaccaacatagttggttttctagtatgaaagagcaccctctagctccatattctaagaatctgaaatatgctactatactaattaataagtaaacttaaggtgtttaaaaaactctgccttctatattaattgtaaaattttgcctctcagaagaatggaattggagattgtagacgtggttttacaaaatgtgaaatgtctaaatatctgttcataaaaataaaaggaaaacatgtttcttcaaaaaaaaaaaa

SEQ ID NO: 24 - DNA, 734 bp, Homo sapiens
  CDS (43)..(606)
gcagttaaggcacacagagcaccagctccctcctgcctgaagatgttccaccaaatttgggcagctctgctctacttctatggtattatccttaactccatctaccagtgccctgagcacagtcaactgacaactctgggcgtggatgggaaggagttcccagaggtccacttgggccagtggtactttatcgcaggggcagctcccaccaaggaggagttggcaacttttgaccctgtggacaacattgtcttcaatatggctgctggctctgccccgatgcagctccaccttcgtgctaccatccgcatgaaagatgggctctgtgtgccccggaaatggatctaccacctgactgaagggagcacagatctcagaactgaaggccgccctgacatgaagactgagctcttttccagctcatgcccaggtggaatcatgctgaatgagacaggccagggttaccagcgctttctcctctacaatcgctcaccacatcctcccgaaaagtgtgtggaggaattcaagtccctgacttcctgcctggactccaaagccttcttattgactcctaggaatcaagaggcctgtgagctgtccaataactgacctgtaacttcatctaagtccccagatgggtacaatgggagctgagttgttggagggagaagctggagacttccagctccagctcccactcaagataataaagataatttttcaaaaaaaaaaaa

SEQ ID NO: 25 - DNA, 2112 bp, Homo sapiens
  CDS (452)..(2062)
tttaacctggaatgacttaaatgtcatcctaacttctaccctctccccaaatgaacgggaaagagttttttctctagcccaatttcacactgataactgccagcttcatgagccagacctccatgaaggcattagagcagttccccgagaagatcccaatggaactatcaggcaaattccccagcagctgaagactgacactgcccgatcgcctcagaagcctcctggaccatcgcggatgctttgggtaactcttacagtggaggagctccgtttccctctgacctgggtcgggcgggcagctgcggctgctgaggctcggtggggcccctccaagacgcgtgtccgcatctgcccgccgggcgtctgcggggtgcagcgtccactggagcgcgacagcccctgggacagaggaggacagtggcctcgcttcccttctccctcccgcgcgatggcctcggcgctgagctatgtctccaagttcaagtccttcgtgatcttgttcgtcaccccgctcctgctgctgccactcgtcattctgatgcccgccaagtttgtcaggtgtgcctacgtcatcatcctcatggccatttactggtgcacagaagtcatccctctggctgtcacctctctcatgcctgtcttgcttttcccactcttccagattctggactccaggcaggtgtgtgtccagtacatgaaggacaccaacatgctgttcctgggcggcctcatcgtggccgtggctgtggagcgctggaacctgcacaagaggatcgccctgcgcacgctcctctgggtgggggccaagcctgcacggctgatgctgggcttcatgggcgtcacagccctcctgtccatgtggatcagtaacacggcaaccacggccatgatggtgcccatcgtggaggccatattgcagcagatggaagccacaagcgcagccaccgaggccggcctggagctggtggacaagggcaaggccaaggagctgccagggagtcaagtgatttttgaaggccccactctggggcagcaggaagaccaagagcggaagaggttgtgtaaggccatgaccctgtgcatctgctacgcggccagcatcgggggcaccgccaccctgaccgggacgggacccaacgtggtgctcctgggccagatgaacgagttgtttcctgacagcaaggacctcgtgaactttgcttcctggtttgcatttgcctttcccaacatgctggtgatgctgctgttcgcctggctgtggctccagtttgtttacatgagattcaattttaaaaagtcctggggctgcgggctagagagcaagaaaaacgagaaggctgccctcaaggtgctgcaggaggagtaccggaagctggggcccttgtccttcgcggagatcaacgtgctgatctgcttcttcctgctggtcatcctgtggttctcccgagaccccggcttcatgcccggctggctgactgttgcctgggtggagggtgagacaaagtatgtctccgatgccactgtggccatctttgtggccaccctgctattcattgtgccttcacagaagcccaagtttaacttccgcagccagactgaggaagaaaggaaaactccattttatccccctcccctgctggattggaaggtaacccaggagaaagtgccctggggcatcgtgctgctactagggggcggatttgctctggctaaaggatccgaggcctcggggctgtccgtgtggatggggaagcagatggagcccttgcacgcagtgcccccggcagccatcaccttgatcttgtccttgctcgttgccgtgttcactgagtgcacaagcaacgtggccaccaccaccttgttcctgcccatctttgcctccatgtctcgctccatcggcctcaatccgctgtacatcatgctgccctgtaccctgagtgcctcctttgccttcatgttgcctgtggccacccctccaaatgccatcgtgttcacctatgggcacctcaaggttgctgacatggtaacacagctgtttttatttactcccgtcggactataacgctgttgtcataagggatgccccatttatgaatgacagagtttcaa

SEQ ID NO: 26 - DNA, 1961 bp, Homo sapiens
  CDS (143)..(1843)
tgtgacgggcggcccttcgtctcaccttccgtcctcgggcccgcaggtcgcagggcggcctgcagctgggccgcggccgaggaggcagcgcgacctccgcactattctttcaacttttaagaacaaatgcaccttatagctcatggaagaaaaaacacaaatcaagacatttttgggttccaagttgccaaagtatggaacaaaatctgtaagaagtacattgcagccaatgccaaatgggacacctgttaatttattaggaacttccaagaatagtaatgtcaaaagttacatcaaaaataatggctctgattgtccatcatctcattcatttaattggaggaaagcaaataaatatcagctttgtgcacaaggtgtcgaagagcctaacaatactcaaaattcacatgataaaataattgatcctgaaaaacgtgttcctactcaaggaatgtttgataaaaatgggataaagggaggtttgaaaagtgtttctttattcacatcaaagttagcaaagccatccactatgtttgtgtcatctacagaggagttaaaccaaaagtctttttctggaccatctaatttgggtaaattcaccaaaggcacattattaggaaggacttcatattcttcgatcaatactccaaaatcacagttgaatggattttatggaaaccgatcagctggtagcatgcaaaggcctagagcgaactcctgtgccaccagaagcagttctggagaaagcttagctcaatccccagacagtagtaaatctattaattgtgaaaaaatggtaaggtcacaaagtttttcacattccattcagaattcattccttccaccttcatctataaccagatcacattcctttaatagagctgtggatcttacaaagccttatcagaaccaacagctatccattagagtgcctctacggtcaagtatgctaacaagaaattcccggcagccagaagtactcaatgggaatgaacatttggggtatggatttaataggccttatgctgctggtggaaagaagttggctttaccaaatggcccaggtgtaacttctactttaggttatagaatggttcatccctctctactgaaatctagccgatctccattttctgggactatgacagttgatggaaataaaaattcacctgctgacacatgtgtagaggaagatgctacagttttggctaaggacagagctgctaataaggaccaagaactgattgaaaatgaaagttatagaacaaaaaacaaccagaccatgaaacatgatgctaaaatgagatacctgagtgatgatgtggatgacatttccttgtcgtctttgtcatcttctgataagaatgatttaagtgaagactttagtgatgattttatagatatagaagactccaacagaactagaataactccagaggaaatgtctctcaaagaagagaaacatgaaaatgggccaccacaggatatgtttgattcccccaaggaaaatgaaaaagccttcagtaaaactgatgaatggatagatataagtgtctctgacaggagtgaatgtacaaaacatacttctgggaataatttggtttcaccagatacagactacagagctggttcttcgtttgaactctctccatctgatagctctgatggaacatacatgtgggatgaagaaggcttggaacccattggaaatgtccatccagttgggagctatgagtcctctgaaatgaacagcatagtatgtatggatttatatactcttggaatattttgtttaccctactatagagagacttgtgatatgattgattttgtaaaaaatttatgaattaactttactactttgagaaatggaaattcatatttgttaagagcctataaaatatctgactctaatatgaaataaagcatggagaatatatgacatttgaaaaaaaaaaaaa

SEQ ID NO: 27 - DNA, 751 bp, Homo sapiens
  CDS (44)..(520)
cgcgtccgcacgtaacggagtggccaacggcctgcagagcaacatgcccaagttttattgtgactactgcgatacatacctcacccatgactctccatctgtgagaaagacacactgcagtggaaggaaacacaaagagaatgtgaaagactattatcagaaatggatggaagagcaggctcagagcctgattgacaaaacaacggctgcatttcaacaaggaaagatacctcctactccattctctgctcctcctcctgcaggggcgatgataccacctccccccagccttccgggtcctcctcgccctggtatgatgccagcaccccatatggggggccctcccatgatgccaatgatgggccctcctcctcctgggatgatgccagtgggacctgctcctggaatgaggccgcccatgggaggccatatgccaatgatgcctgggcccccaatgatgagacctcctgcccgtcccatgatggtgcccactcggcccggaatgactcgaccagacagataaggatagaggggaggccttattgtatcggttttatattacctgttctgcttcaccaggagatcatgctgctgtgatactgagttttctaaacagcataaggaagacttgctcccctgtcctatgaaagagaatagttttggaggggagaagtgggacaaaaaagatgcagttttcctttgtattgggaaatgtgaaaataaaattgtcaactctttcaaaaaaaaaaaa

SEQ ID NO: 28 - DNA, 3075 bp, Homo sapiens
  CDS (69)..(2786)
ggtgggtttatctcaaggcctgagtagccggtaacaaacgagggttcccgggattggaccgacgcaccatgcctctgcgacttgatatcaaaagaaagctaactgctagatctgatcgagttaagagtgtggatctgcatcctacagagccatggatgttggcaagtctttacaatggcagtgtgtgtgtttggaatcatgaaacacagacactggtgaagacatttgaagtatgtgatcttcctgttcgagctgcaaagtttgttgcaaggaagaattgggttgtgacaggagcggatgacatgcagattagagtgttcaattacaatactctggagagagttcatatgtttgaagcacactcagactacattcgctgtattgctgttcatccaacccagcctttcattctaactagcagtgatgacatgcttattaagctctgggactgggataaaaaatggtcttgctcacaagtgtttgaaggacacacccattatgttatgcagattgtgatcaaccccaaagataacaatcagtttgccagtgcctctttggacaggactatcaaggtgtggcagttgggctcttcgtcaccaaacttcactttggaaggacatgagaaaggcgtgaattgcattgattactacagtggtggggacaagccatacctcatttcaggtgcagatgaccgtcttgttaaaatatgggattatcagaataaaacatgtgtgcagacactggaaggacatgcccaaaatgtgtcttgtgccagctttcatcctgagttgccaatcattatcacaggttcagaagatggaacagtacgtatttggcattcaagcacctaccggcttgagagcacactgaattatggaatggagagggtatggtgcgtggccagtctaagagggtcaaacaatgtcgctttgggctatgatgaagggagcatcattgttaagcttggtcgggaggaacctgccatgtccatggatgccaatggaaagataatttgggccaagcattcagaagtccagcaggccaacctaaaagcaatgggagatgctgaaattaaagatggtgaaagattgccactggcagtaaaggatatgggcagttgtgaaatataccctcagactattcagcacaatcctaatgggcggtttgtggtggtgtgtggtgatggggagtatatcatctacacagcaatggcattgagaaacaagagctttggatctgctcaggagtttgcatgggcccacgattcttcagagtatgcaataagagagagcaacagcattgtaaagatatttaagaactttaaggaaaaaaaatcatttaaaccagattttggagcagaaagtatctacggcggcttcttattgggagtcagatctgtaaatggcttagccttctatgactgggacaatacagaactcatacgaagaattgaaattcagcccaaacatattttctggtctgactctggagagctagtctgtattgctactgaggaatcattttttatccttaagtatctgtcagaaaaagtcttggctgcacaggaaacacatgagggagttactgaagatggcattgaagatgcctttgaggttcttggtgagattcaggaaattgtgaaaacagggctttgggtaggcgattgcttcatttacacaagttctgtgaacagattaaattattatgttggaggagaaatagtcaccattgcccacttggacaggacgatgtatctcctaggctacattcctaaagacaacaggctttatctgggggataaagaattgaacatcattagctattccctgctggtttcagtcctggaataccagacagctgtcatgcggagggactttagcatggctgataaggtccttcctaccattccaaaagaacagaggaccagagttgcacactttttggaaaagcagggcttcaagcagcaagctcttacagtatccacagatcctgagcatcgttttgagcttgctcttcagcttggagagttaaaaattgcataccagttagcagtggaagcagagtcagaacagaagtggaaacaacttgctgaacttgccattagtaaatgtcagtttggcctagcccaggagtgcctgcatcatgcacaggattatgggggcctgctgcttttggccactgcctctggaaatgctaatatggtgaacaagctagcagagggtgcggagagagatggcaaaaataatgtggcattcatgagctactttttacagggcaaggttgatgcctgcctagagctcttaattagaactggacggctgccagaagctgccttcttggcccgaacttacttacccagtcaggtttcaagggtagtgaaactctggagagagaatctctcaaaagtcaatcagaaagcagcagaatcccttgctgacccaacagagtatgaaaacctgttccctggattaaaagaagcctttgttgttgaagaatgggtgaaggaaacacatgctgatctgtggccagccaaacaatacccacttgtcacgccaaatgaagagagaaatgtcatggaagagggaaaagactttcagccctcaagatctacagctcaacaggaacttgatgggaaacctgcttctcctactccggttattgtggcctcccacacagccaacaaagaagaaaagagtttactcgaactagaagtagatttggataatttggaattagaagatattgacacaacagatatcaatctggatgaagatattttggatgattgactgtaatgctttccatttacctgactaaacagatcattattatatataggtattgattgctaccctgaccacagtgctttggactatgagaaacttcttagatttttatatgtaaatgctgtggaccactgggagcacaatgcccacatcatcttaagaagagtttatgtgcagcatttaaatcactgtgttttccttgttaactaaaacagacatgggctttgatttttttcatactattagaccatatctcataaaaccttttgaattaataaaaaaaaaaaaa

SEQ ID NO: 29 - DNA, 2695 bp, Homo sapiens
  CDS (1)..(2649)
atgaatacatcacaattattagaaatagccaaccaggtgtttgtaaacagggctgcagtaagccttgaggaaaaccgcaaagagaatggacatcaggcccggcgaaacaccgacctggttgtcagctgcagcaatcagaggggtcaggagtcactggaaaagttgttaggccggtatttctacatctcgcatttgtcagccctcgccaaaaccatgaggcagcggtttgttacctgccgacaccataatgcgaggcaaggtccagctgttccgcccggcatacaagcttatgcagcagcccccattgaagatctgcaggccattaggaacaatatcacagcgggtgtttacacaccctgcgatattggaggtaatatcatcctctgccccctggcatattaccaacgatatcaaacaggggtggtgtacaccccttgtgatattgggagtattatcatcctctccacctccgggtgtccaagtcacacagagccacggaatctcacaggtgtctcagaattcctcctcctgggactctcagaggatccagaactgcagcctgtcctccctgggctgtccctgtccatgtatctgctcacggtgctgaggaacctgctcatcatcctggctgtcagctctgactcccacctccacacccccatgtacttcttcctctccaacccgtcatgggctgacatcgctttcacctcggccacagttcccaagatgattgtggacatgcagagtggtgtggtggtgtcagtgatgtacactgtggtcacccccatgctgaaccctttcatctactgcctgagaaacagggacattcaaagcgccctgtggaggctgcgcagcagaacagtcgaatctcatgatctgttccatcctttttcttgtgtgggtatccactgtcaggtctctgagcttgatgctgtcatgtcccttgacaccgcttccggggcttttcggtggatggcttttggggtggaagtggcagccccagcttaccagccatcatgctcatgtccgggatctcagtcctctggggaaggggccagaaaaggctggagcagccgaagtctttcggaaacagtatctgcggtatattcagggctgactcaggaaagaagatgccagccccagagtcccacctccaccgttggttccatcataatgaatggatccaatatggcaaatacatcaccgagtgtaaaatccaaagaggaccaggggttaagtgggcacgatgaaaaggaaaacccatttgcagagtacatgtggatggagaatgaagaggatttcaacagacaggtggaggaggaactgcaggagcaagacttcttggaccgctgcttccaagagatgctggatgaagaagaccaagactggtttattccctcacgagacctgcctcaggccatgggacagttgcaacagcagttaaatggactgtcagtcagtgaaggtcatgattctgaagatattttggtccatgggcgcaggtccctgagcccacagcttcgcgggggtctggccgagcatgcgtcacaacctacgcggccaagagcagtgcgcacgcgcaacctaacgcgggactgccagcaacttccgggcgtttacaggcaggcaggatccaggaggacgggaggggccgctgcggaccgcagtcgctccacctggaggagacaccagaaggaagacagcctgagggacgcagccatccccggctcctaccggcgccccgccccgcgcatgcgcacgcgcacagggagtcagctggctgcgcgggaggtcacgggaagtggggcggtgcccagacagctggagggaaggaggtgtcaggcggggagagacgcaaacggcgggaccagcagcgacggtagcagcagcatggccgcgatctatgggggtgtagaggggggaggcacacgatccgaggtccttttagtctcagaggatgggaagatcctggcagaagcagatggactgagcacaaaccactggctgatcgggacagacaagtgtgtggagaggatcaatgagatggtgaacagggccaaacggaaagcaggggtggatcctctggtaccgctgcgaagcttgggcctatctctgagcggtggggaccaggaggacgcggggaggatcctgatcgaggagctgagggaccgatttccctacctgagtgaaagctacttaatcaccaccgatgccgccggctccatcgccacagctacaccggatggtggagttgtgctcatatctggaacaggctccaactgcaggctcatcaaccctgatggctccgagagtggctgcggcggctggggccatatgatgggtgatgagggttcagcctactggatcgcacaccaagcagtgaaaatagtgtttgactccattgacaacctagaggcggctcctcatgatatcggctacgtcaaacaggccatgttccactatttccaggtgccagatcggctagggatactcactcacctgtatagggactttgataaatgcaggtttgctgggttttgccggaaaattgcagaaggtgctcagcagggagaccccctttcccgctatatcttcaggaagagctggggagatgctgggcaggcacatcgtagcagtgttgcccgagattgacccggtcttgttccagggcaagattggactccccatcctgtgc

SEQ ID NO: 30 - DNA, 742 bp, Homo sapiens
  CDS (338)..(532)
acggagggtgggagcagtggatggtgggagggaatggagataataaatggaacaacaactatcttattaaaataagataataacagtcaaaactaatacaaagcatataaaaccaggtaagatgataaacatgaatgccgaaaactgcttaagaaaagggtagcagggagttattttctgagtagatgacatttatgctaaacgtggaacaaggagatggagccaaccctgaaaattctgggagaagaggacagaaggcagagggaagagcaagagcaaaaattctgaaacaggagaaattgtgagcatatcagcattaagtaccactgaggtggcaatgcacacttcaacctcttcttcagtcacaaagagttacatctcatcacagacaaatggagaaacgggacaacttgtccatcgtttcactgtaccagctcctgtagtgataatactcattattttgtgtgtgatggctggtattattggaacgatcctcttaatttcttacagtattcgccgactgataaaggcatgaggatgtggcctgcatgctgcctgatcttgcctagaaccggctgcacctgctgttctcttgtttatgcaaactggctgcacctgctattcctttgcttatgcccctacccctggctatcctaattccctgttctcctgcctcactattactgtattctctacttctaaataaaaataaaacaaaatacaaaccgttaaaaaaaaaaaa

SEQ ID NO: 31 - DNA, 1474 bp, Homo sapiens
  CDS (274)..(930)
aaggatccttaattaaattaatccccctcccccggagctttctcgcgggcttgcagctgcggcaagtgctggcggcggctgctcgcgcaagtcagctggcgtgggaactaccctttgtagctgagaacggcttgtttattgctacaaagactctattgacattggtagcttcagcggcagcagcttcttacggtataaagctgttgcttcctgaagaggctacaagcatccttccctaggactgctgtaagctttgagcctctagcaggagacatgcctcggggacgaaagagtcggcgccgccgtaatgcgagagccgcagaagagaaccgcaacaatcgcaaaatccaggcctcagaggcctccgagacccctatggccgcctctgtggtagcgagcacccccgaagacgacctgagcggccccgaggaagacccgagcactccagaggaggcctctaccacccctgaagaagcctcgagcactgcccaagcacaaaagccttcagtgccccggagcaattttcagggcaccaagaaaagtctcctgatgtctatattagcgctcatcttcatcatgggcaacagcgccaaggaagctctggtctggaaagtgctggggaagttaggaatgcagcctggacgtcagcacagcatctttggagatccgaagaagatcgtcacagaagagtttgtgcgcagagggtacctgatttataaaccggtgccccgtagcagtccggtggagtatgagttcttctgggggccccgagcacacgtggaatcgagcaaactgaaagtcatgcattttgtggcaagggttcgtaaccgatgctctaaagactggccttgtaattatgactgggattcggacgatgatgcagaggttgaggctatcctcaattcaggtgctaggggttattccgccccttaagtagatctgaggcagacccttgggggtgtaaaagagagtcacaggtaccccaaggagtagatgccagggtcctaagttgaaaatgatgtcgattgggggcgggggacactgtatttgatatttgtgatcagtgatcattgttcaactgcgaaatagagtgtttgcttttgataatggaaaattgtattcgttttaaaattccgtttgttgagaataacaatatgtttaaaaatataattgaacaaatttgtttctttgttgcctgtcaggaacagttagtagaacagttttgctagcgttctaaaatgaagtcgttccatcataatctatgatcttgtacgggggggggaggggtaagctgttcttttgaagttgaaatacccagtaaaatgttgaagaaggatggaggatttcttcatatctgacgtttctgaaaccctttgtgtctgctgttgtgtgaagattgacatttaccatgattttccttagttactgcagaacatagagaaaaataaaagcctaacgaataaaaaaaaaaaaa

SEQ ID NO: 32 - DNA, 592 bp, Homo sapiens
  CDS (86)..(460)
gtgtcgccgctgtgccgctagcggtgccccgcctgctgcggtggcaccagccaggaggcggagtggaagtggccgtggggcgggtatgggactagctggcgtgtgcgccctgagacgctcagcgggctatatactcgtcggtggggccggcggtcagtctgcggcagcggcagcaagacggtgcagtgaaggagagtgggcgtctggcggggtccgcagtttcagcagagccgctgcagccatggccccaatcaaggttcggctcctggctgatcccactggggcctttgggaaggagacagacttattactagatgattcgctggtgtccatctttgggaatcgacgtctcaagaggttctccatggtggtacaggatggcatagtgaaggccctgaatgtggaaccagatggcacaggcctcacctgcagcctggcacccaatatcatctcacagctctgaggccctgggccagattacttcctccacccctccctatctcacctgcccagccctgtgctggggccctgcaattggaatgttggccagatttctgcaataaacacttgtggtttgcggccaaaaaaaaaa

SEQ ID NO: 33 - DNA, 779 bp, Homo sapiens
  CDS (16)..(726)
gacgcgtgggcagcgatggcggctgcgtcggggtcggttctgcagcgctgtatcgtgtcgccggcagggaggcatagcgcctctctgatcttcctgcatggctcaggtgattctggacaaggattaagaatgtggatcaagcaggttttaaatcaagatttaacattccaacacataaaaattatttatccaacagctcctcccagatcatatactcctatgaaaggaggaatctccaatgtatggtttgacagatttaaaataaccaatgactgcccagaacaccttgaatcaattgatgtcatgtgtcaagtgcttactgatttgattgatgaagaagtaaaaagtggcatcaagaagaacaggatattaataggaggattctctatgggaggatgcatggcaatgcatttagcatatagaaatcatcaagatgtggcaggagtatttgctctttctagttttctgaataaagcatctgctgtttaccaggctcttcagaagagtaatggtgtacttcctgaattatttcagtgtcatggtactgcagatgagttagttcttcattcttgggcagaagagacaaactcaatgttaaaatctctaggagtgaccacgaagtttcatagttttccaaatgtttaccatgagctaagcaaaactgagttagacatattgaagttatggattcttacaaagctgccaggagaaatggaaaaacaaaaatgaatgaatcaagagtgatttgttaatgtaagtgtaatgtctttgtgaaaagt

SEQ ID NO: 34 - DNA, 567 bp, Homo sapiens
  CDS (56)..(514)
agccgggctggtcctgctgcgagccggcggcccggagtggggcggcggagcaaacatgaacgttggagttgcccacagtgaagtgaatccaaatacccgtgtcatgaacagccggggtatgtggctgacatatgcattgggagttggcttgcttcatattgtcttactcagcattcccttcttcagtgttcctgttgcttggactttaacaaatattatacataatctggggatgtacgtatttttgcatgcagtgaaaggaacacctttcgaaactcctgaccagggtaaagcaaggctcctaactcattgggaacaactggactatggagtacagtttacatcttcacggaagtttttcacaatttctccaataattctatattttctggcaagtttctatacgaagtatgatccaactcacttcatcctaaacacagcttctctcctgagtgtactaattcccaaaatgccacaactacatggtgttcggatctttggaattaataagtattgaaatgttttgaaactgaaaaaaaattttacagctactgaatttcttataag

SEQ ID NO: 35 - DNA, 1518 bp, Homo sapiens
  CDS (252)..(566)
aaggatccttaattaaattaatcccccccccccccgactcttgtttcgctccttgacaaccctggcgggggttcgctggctgcggccccggctccggcccccgcaggagcagcaccccccggggaaagacattttctgctcccaccgagttggcagggcctgcttcctgaatctcctgggtgtgtcttaactgccagtcccagcacctcctgaaagccccactctcctccagtggtcacagtggaaggatcatgggagaaacagaagggaagaaagatgaggctgactataagcgactgcagaccttccctctggtcaggcactcggacatgccagaggagatgcgcgtggagaccatggagctatgtgtcacagcctgtgagaaattctccaacaacaacgagagcgccgccaagatgatcaaagagacaatggacaagaagttcggctcctcctggcacgtggtgatcggcgagggctttgggtttgagatcacccacgaggtgaagaacctcctctacctgtacttcgggggcaccctggctgtgtgcgtctggaagtgctcctgacactctgtcccctgccccgtcccctgcagggccttttcctgccactcatctggggtggggagcagccctaggcaggtcctggtttttccaaggagagttggggtcttttctttttgtctttgtgtaccagtttcctgagccacgcccagtgtgtgaacttgacatctccatccccaggctctcaactgtctccctcggagtctcagggtgtggacggggcagcgggcatgggtctgtgtgggagacgtggggtggggcggtgtgacagggtagaggaggtgggagatgagatcttccgcacaggaacacgccagtccccctttctccagggctgccttccccttgcatcctgggagccccactgccctgccatccccagtactgccgggaagtgtcggccgtccttgtcattagtggtcatatgaaaatggccccaagaaggagatgattctttcaagggacacaggcagcttctctccttgtcctctggggaggtgctgacccctcagaaaccccttcccccaacttgaccccaggctgaacagaccactgcatctcactgggccagcagcccccccagcccccagccttggtggggaccaagcagcctttcccgtcccctcctcgacccgtacagttgagagccaggggctggtgtgtgggagctgctacctggcagtttctcgaggggtcaccgagcctctggtgggacacctgggcaggagtgctctcaccacgaggctgcttccgcagggaaccctggcctgcccgcgacttcgcatcagggaccgcatgctgatttgtactgctctctgctgggttttctatgttcttttcgagtgtgggaaaagggttttagtagaagggtgaatcgtattttacacagcggtcttatttatataaatgtcttggtttttacaattaaaatgaccaaaaactgaaaaaaaaa

SEQ ID NO: 36 - DNA, 1056 bp, Homo sapiens
  CDS (186)..(395)
gccgggccccaccggacggcttgctctgctctttacctggggttgctgtcgaggaccctgtgcaagactcggccggtttttctttctccctgatggacagacccaaacatagccgcgcagcatcgtgaagggctggggccttcactcctctgtggctctggaagagcccgatttcctcaggaggcatgtcgggccccaggcctgtggtgctgagcgggccttcgggagctgggaagagcaccctgctgaagaggctgctccaggagcacagcggcatctttggcttcagcgtgtcccataccagggctctcgtggagggataccacgaggaacccgaggcccggcgaggagaacggcaaagattactactttgtaaccagggaggtgatgcagcgtgacatagcagccggcgacttcatcgagcatgccgagttctcggggaacctgtatggcacgagcaaggtggcggtgcaggccgtgcaggccatgaaccgcatctgtgtgctggacgtggacctgcagggtgtgcggaacatcaaggccaccgatctgcggcccatctacatctctgtgcagccgccttcactgcacgtgctggagcagcggctgcggcagcgcaacactgaaaccgaggagagcctggtgaagcggctggctgctgcccaggccgacatggagagcagcaaggagcccggcctgtttgatgtggtcatcattaacgacagcctggaccaggcctacgcagagctgaaggaggcgctctctgaggaaatcaagaaagctcaaaggaccggcgcctgaggcttgctgtctgttctcggcaccccgggcccatacaggaccagggcagcagcattgagccacccccttggcaggcgatacggcagctctgtgcccttggccagcatgtggagtggaggagatgctgcccctgtggttggaacatcctggggtgacccccgacccagcctcgctgggctgtcccctgtccctatctctcactctggacccagggctgacatcctaataaaataactgttggattagaaaaaaaaa

SEQ ID NO: 37 - DNA, 456 bp, Homo sapiens
  CDS (51)..(401)
ctactaaattcgcggccgcgtcgacgggacgttgtctgcaggcactcagaatggtccagcgtttgacataccgacgtaggctttcctacaatacagcctctaacaaaactaggctgtcccgaacccctggtaatagaattgtttacctttataccaagaaggttgggaaagcaccaaaatctgcatgtggtgtgtgcccaggcagacttcgaggggttcgtgctgtaagacctaaagttcttatgagattgtccaaaacaaagaaacatgtcagcagggcctatggtggttccatgtgtgctaaatgtgttcgtgacaggatcaagcgtgctttccttatcgaggagcagaaaatcgttgtgaaagtgttgaaggcacaagcacagagtcagaaagctaaataaaaaaatgaaacttttttgagtaataaaaatgaaaagacgctgtaaaaaaaaa

SEQ ID NO: 38 - DNA, 2950 bp, Homo sapiens
  CDS (222)..(1634)
gcaggcagggcaactacctgctgtgctcactgctgctgggcaacgtgctggtcaacaccacgctcaccatcctgctcgacgacatcgccggctcgggcctcgtggccgtggtagtctccaccatcggtatcgtcatcttcggagagatcgtgccccaggccatctgctcccggcatggcctggctgtgggggccaacaccatcttcctcaccaagtttttcatgatgatgaccttccccgcttcctacccggtcagcaagctgctggactgcgtcctgggccaggagataggcaccgtctataaccgggaaaaactgctggagatgctccgggtcaccgatccctacaacgacctcgttaaggaggagctgaacatcatccaaggggcgctggagctccgcaccaagacggtggaggacgtgatgaccccactccgggactgcttcatgatcaccggcgaagccatcctggacttcaacaccatgtctgagatcatggagagcggctacacccgcattccagtgtttgaaggggagcgctccaatatcgtggacctgctgtttgtcaaagacttggccttcgtggatcccgatgactgtacccccctgaaaaccatcaccaaattttataaccaccccttgcactttgttttcaatgacaccaagttggacgctatgctggaagaatttaagaaaggtaaatctcacctggctatcgtgcagcgggtaaacaatgagggagaaggggatccattttatgaagttctgggaatcgtcaccttagaagatgtgattgaagaaatcatcaaatctgagattcttgatgaaacagatttatacactgacaacagaacgaaaaagaaagtggctcaccgggaacgaaagcaagatttttctgcctttaagcagacagacagtgagatgaaggttaaaatatcaccacagctcctcctggccatgcaccgtttcctagcaacagaagtagaagcatttagcccatcccagatgtcagagaagatccttctaaggctgctaaagcaccccaatgtcatccaggaactgaaatatgatgagaagaacaagaaagcccccgaatactacctctaccagcgcaacaagccagtagactacttcgttctcattctgcaggggaaagtggaagttgaagctgggaaagaaggtatgaagtttgaagcgagcgccttctcatactatggcgtgatggccctgacagcctctccaggtgaaaataagtcccctcctcgcccatgtggcttgaatcactcagactctctcagtcgaagcgaccggattgacgccgtcacaccaacactggggagcagcaataaccagctcaattcttcgctcctccaagtctacatccccgattactcggtgcgagccctttcggatctgcagtttgttaagatctcaagacagcaataccaaaatgccttgatggcatcccggatggacaaaaccccccagtcttcagacagtgaaaacactaaaatcgaattgactcttacggagctgcatgacgggttgccagacgagacagccaacctgctcaacgaacagaactgtgtgacgcacagtaaggccaaccacagcctgcacaacgaaggcgccatctaggccgcgctggctgcacccgcccaggcccgcacccgcccagtcccgagggcccggccctgtctgcccatgacttcactggtgtgagcttgtccgccatgctgtaccctgcaacatcctgagaccaaagaccttgtgcccttcccaggagccgcggaggaggacagtgagggaggaatggaaacgagagatgtgaagttggcagccggggcatggcgttcaagattttggagatgaactgattccgcccaaatagaatcatgtttattttttcagctctcccttttatcattattcacactcctctgccctcgatttgcatgaagttgaaaattgttgcgatttattttttcaagagatcatgtttttaaagtgtcttttgcagagttttaagttgttctgtctgaactctgctgtgatcccatgatgtgaccctgatgggctggacttgcccctccggtagccttccttggccctcccagcgaggggcacccttcctctgtgccccagtgggcatcaccgtcgatctcgctggctgaatgaagaagaccgtgttactgcagaacctgccaagtctgtcatcactgtggggtgtagcctgcctcagagggacctgcaatcacctctctgagctcagtggtattttgagaatttaatgtttaactgtacccctttccctcaggaagatttaacatttgcttgggaatgtgattttgctcccaccctaaggaatttttatcaccaaaatgaatgttaatgaatttaaaacccatggtttatcattggcaagaggcaagttgacttcatcctgtcattccagcctggggtctgccagccagccctcctccccgacccagcgcctaagctcacagagtgtcgtcacccacctccctggtccttgctcttgttaacccaagatgctgctacacagatgccaaatggaaatcttccacagggctttttcagtaaacacgtgatgtggagtgcaagctcctccccttcccactagaacatactttaacagaaaacgagtcggaccttctagctgcactctgtactgtgtgccgagaaggcatttctagacccgtgtttttaaaggagggaactttggggattgccagcccctgctcctcctcccagggagccaactgtccctcctcccctgtccctgggcccatggggcccggcagtggctgtgtcccctgcctgagggctctgtgcctcctgcctcagatgcggcctgtgccagagaggctgcctgtacagccagggtcagtttggccccaaacagggattcagaaaccaaaaaaaaaaaa

SEQ ID NO: 39 - DNA, 412 bp, Homo sapiens
  CDS (204)..(326)
taacttcaggaaccagctcatgatctcaggatgtatggaaaaataatctttgtattactattgtcaggagaaacgggacaacttgtccatcgtttcactgtaccagctcctgtagtgataatactcattattttgtgtgtgatggctggtattattggaacgatcctcttaatttcttacagtattcgccgactgataaaggcatgaggatgtggcctgcatgctgcctgatcttgcctagaaccgtctgcacctgctgttctcttgtttatgcaaactggctgcacctgctattcctttgcttatgcccctacccctggctatcctaattccctgttctcctgcctcactattactgtattctctacttctaaataaaaataaaacaaaatacaaaccgttaaaaaaaaaa

SEQ ID NO: 40 - DNA, 441 bp, Homo sapiens
  CDS (9)..(308)
gagacaccatgagagccctcacactcctcgccctattggccctggccgcactttgcatcgctggccaggcaggtgcgaagcccagcggtgcagagtccagcaaaggtgcagcctttgtgtccaagcaggagggcagcgaggtagtgaagagacccaggcgctacctgtatcaatggctgggagccccagtcccctacccggatcccctggagcccaggagggaggtgtgtgagctcaatccggactgtgacgagttggctgaccacatcggctttcaggaggcctatcggcgcttctacggcccggtctagggtgtcgctctgctggcctggccggcaaccccagttctgctcctctccaggcacccttctttcctcttccccttgcccttgccctgacctcccagccctatggatgtggggtccccatcatcccagctgc

SEQ ID NO: 41 - DNA, 724 bp, Homo sapiens
  CDS (1)..(639)
atggctgtcccagcagtgtccgggctctcccggcaggtgcgatgcttcagtacctctgtggtcagaccatttgccaagcttgtgaggcctcctgttcaggtatacggtattgaaggtcgctatgccacagctctttattctgctgcatcaaaacagaataagctggagcaagtagaaaaggagttgttgagagtagcacaaatcctgaaggaacccaaagtggctgcttctgttttgaatccctatgtgaagcgttccattaaagtgaaaagcctaaatgacatcacagcaaaagagaggttctctcccctcactaccaatctgatcaatttgcttgctgaaaatggtcgattaagcaatacccaaggagtcgtttctgccttttctaccatgatgagtgtccatcgcggagaggtaccttgcacagtgacctctgcatctcctttagaagaagccacactctctgaattaaaaactgtcctcaagagcttcctaagtcaaggccaagtattgaaattggaggctaagactgatccgtcaatcttgggtggaatgattgtgcgcattggcgagaaatatgttgacatgtctgtcaagaccaagattcagaagctgggcagggctatgcgggagattgtctaaaagtgttggttttctgccatcagtgaaaattcttaaacttggagcaacaataaaaagcttccagaacagaaaaaaaaaaaaa

SEQ ID NO: 42 - DNA, 742 bp, Homo sapiens
  CDS (68)..(655)
aaggatccttaattaaattaatcccccccccccccccctctttcctttcgctgctgcggccgcagccatgagtatgctcaggcttcagaagaggctcgcctctagtgtcctccgctgtggcaagaagaaggtctggttagaccccaatgagaccaatgaaatcgccaatgccaactcccgtcagcagatccggaagctcatcaaagatgggctgatcatccgcaagcctgtgacggtccattcccgggctcgatgccggaaaaacaccttggcccgccggaagggcaggcacatgggcataggtaagcggaagggtacagccaatgcccgaatgccagagaaggtcacatggatgaggagaatgaggattttgcgccggctgctcagaagataccgtgaatctaagaagatcgatcgccacatgtatcacagcctgtacctgaaggtgaaggggaatgtgttcaaaaacaagcggattctcatggaacacatccacaagctgaaggcagacaaggcccgcaagaagctcctggctgaccaggctgaggcccgcaggtctaagaccaaggaagcacgcaagcgccgtgaagagcgcctccaggccaagaaggaggagatcatcaagactttatccaaggaggaagagaccaagaaataaaacctcccactttgtctgtacatactggcctctgtgattacatagatcagccattaaaataaaacaagccttaaaaaaaaaaaa

SEQ ID NO: 43 - DNA, 405 bp, Homo sapiens
  CDS (153)..(299)
tgcttcatattaacatagaaaagaaatttcttcacctatctcctgagtcttttgaaatcttcacatatattattttctaaattattattatttaaaattttcttaaagatggagtcttgctctgtctcccaggctggatagagtacagtggcatgatcttagctcactgtaacctcagacttctgggatcaaacaattctcccctcagcctcctgaatagctggggctacaggtgcatgccatcatgcatggctaattttttaaaatttttcgtagagatggggtctcgctacgtagtctaggctgttctcaaactcctgggctcaagcaatcctcccacctcagcctcccaaggcgctgggattataggtgtgagtcaccatccctggcttctattttattact

SEQ ID NO: 44 - DNA, 1921 bp, Homo sapiens
  CDS (701)..(1312)
atgaatgcaggctgggagtccccgctcacagtacaggaaggtttggtgtctggtgagggctgctctgtgcttccaagatggcactgggttgttgtgtcctctggagagggggaaaactgggtctcgtgtgctcctgtggcgagcgggcgccccggaggtttggcaggggtagtgccaacggacacctcatggtgtggtagcttaaactcagagcctaaacgcaggaccagggctaggagcccaggaccagaaggcaaaacttcctacctgatttatggatgggaacttgcagcccctggaggggaatggcttcggtctggagctctacgcactagttctctgggaggacagagggcaggaaaggggtgcagccaaaatcaaactcggttccacttggacgagcagtggggagattcgctgtctgaactactaaggagagtttttaaaaccacttaccagaatctagagtgggaattaaaatctgcgtgggcttcttcagattccacagaaatgaggactgccacaccttctccaacttttgcaggctccacccaggatgcgaaggcactagaatttcccaaattaagaacgaagaggaagtttggaccttttcggccaccgctcgcttcaatatggctgcccccagggagagacgaggctaccatgaaggagccgagcgcagaccctgagtccgtcacccatggatcgcagcgcggagttcaggaaatggaaggcgcaatgtttgagcaaagcggacctcagccggaagggcagtgttgacgaggatgtggtagagcttgtgcagtttctgaacatgcgagatcagtttttcaccaccagctcctgcgctggccgcatcctactccttgaccggggtataaatggttttgaggttcagaaacaaaactgttgctggctactggttacacacaaactttgtgtaaaagatgatgtgattgtagctctgaagaaagcaaatggtgatgccactttgaaatttgaaccatttgttcttcatgtgcagtgtcgacaattgcaggatgcacagattctgcattccatggcaatagattctggtttcaggaactctggcataacggtgggaaagagaggaaaaactatgttggctgtccggagtacacatggcttagaagttccattaagccataagggaaaactgatggtgacagaggaatatattgacttcctgttaaatgtggcaaatcaaaaaatggaggaaaacaagaaaagaattgagagagatggggttttgccatgttgcctaggctggtctcaaactcctggactcaagtgattgcccgccttggcctcccaaagtgttgggattacatgcataagccaccgcacctgtctgacatatgacttgactcccaagaaacttaggttttacaactgcctacagcatgctttggaaagggaaacgatgactaacttacatcccaagatcaaagagaaaaataactcatcatatattcataagaaaaaaagaaacccagaaaaaacacgtgcccagtgtattactaaagaaagtgatgaagaacttgaaaatgatgatgatgatgatctaggaatcaatgttaccatcttccctgaagattactaagctttggttctgatgtgtcttggccgtaatgtttctagtaggttttataaagctgctcttcataagagtattttagtttgttgagtgtatcagccattcataagccagtaatgacaagtgcagagcttcaaactataactttgttgcccagaggatgtgcagttgtcatctaagctctcagcagtacccggcttatcctacgacttcacctgaaatgctatagttatccctacttttttaccagtttctcccagaagcacctgcttaataaatcaaagatgtttgaaaaaaaaaaaa

SEQ ID NO: 45 - DNA, 1026 bp, Homo sapiens
  CDS (91)..(402)
ggctgccaacagatcatgagccatcagctcctctggggccagctataggacaacagaactctcaccaaaggaccagacacagtgagcaccatgggacagtgtcggtcagccaacgcagaggatgctcaggaattcagtgatgtggagagggccattgagaccctcatcaagaactttcaccagtactccgtggagggtgggaaggagacgctgaccccttctgagctacgggacctggtcacccagcagctgccccatctcatgccgagcaactgtggcctggaagagaaaattgccaacctgggcagctgcaatgactctaaactggagttcaggagtttctgggagctgattggagaagcggccaagagtgtgaagctggagaggcctgtccgggggcactgagaactccctctggaattcttggggggtgttggggagagactgtgggcctggaaataaaacttgtctcctctaccaccaccctgtaccctagccctgcacctgtccacatctctgcaaagttcagcttccttccccaggtctctgtgcactctgtcttggatgctctggggagctcatgggtggaggagtctccaccagagggaggctcaggggactggttgggccagggatgaatatttgagggataaaaattgtgtaagagccaaagaattggtagtagggggagaacagagaggagctgggctatgggaaatgatttgaataatggagctgggaatatggctggatatctggtactaaaaaagggtctttaagaacctacttcctaatctcttccccaatccaaaccatagctgtctgtccagtgctctcttcctgcctccagctctgccccaggctcctcctagactctgtccctgggctagggcaggggaggagggagagcagggttgggggagaggctgaggagagtgtgacatgtggggagaggaccagctgggtgcttgggcattgacagaatgatggttgttttgtatcatttgattaataaaaaaaaaaaaa

SEQ ID NO: 46 - DNA, 874 bp, Homo sapiens
  CDS (277)..(591)
gctctggaatcgagttacgcgcgaaagggcagagtttctggaggaaaccgcagcctctcaaccgctgaccgggtctcagaaggcccccggcaggcccgcttggcgggaactgaccacgcgccagtcaggctctccagggacctgcgcaggcgcgtgtgggcggagtcgtgcgcagggggcggggcttcgggaaggagccacagagagggcggggcgtaggacctgcgcttcgggggtggagtcggagcggcgcggcggcggtcatgcgggacgcggatgcagacgcaggcggaggcgctgacggcggggatggccggggtggccacagctgccgcgggggcgtggacacagccgcagctccggccggtggagctcccccagcgcacgcgccaggtccgggcagagacgccgcgtctgcgccagggggtcacgaatgcggccgcacatattcaccctcagcgtgcctttcccgacccccttggaggcggaaatcgcccatgggtccctggcaccagatgccgagccccaccaaagggtggttgggaaggatctcacagtgagtggcaggatcctggtcgtccgctggaaagctgaagactgtcgcctgctccgaatttccgtcatcaactttcttgaccagctttccctggtggtgcggaccatgcagcgctttgggccccccgtttcccgctaagcctggcctgggcaaatggagcgaggtcccactttgcgtctccttgtaggcagtgcgtccatccttccctagggcaggaattcccacagttgctactttcctgggagggcctcatgttttatctggttcttaaatgtttgttactacagaaaataaaactgcgctactaaaaaaaaaaaa

SEQ ID NO: 47 - DNA, 1117 bp, Homo sapiens
  CDS (93)..(896)
agctgttgtgcatccagaggtggaattggggcccggcattccctcctcgtcccgggctggcccttgcccccaccctgcaactcctggttgagatgggctcagccaagagcgtcccagtcacaccagcgcggcctccgccgcacaacaagcatctggctcgagtggcggacccccgttcacctagtgctggcatcctgcgcactcccatccaggtggagagctctccacagccaggcctaccagcaggggagcaactggagggtcttaaacatgcccaggactcagatccccgctctcctactcttggtattgcacggacacctatgaagaccagcagtggagaccccccaagcccactggtgaaacagctgagtgaagtatttgaaactgaagactctaaatcaaatcttcccccagagcctgttctgcccccagaggcacctttatcttctgaattggacttgcctctgggtacccagttatctgttgaggaacagatgccaccttggaaccagactgagttcccctccaaacaggtgttttccaaggaggaagcaagacagcccacagaaacccctgtggccagccagagctccgacaagccctcaagggaccctgagactcccagatcttcaggttctatgcgcaatagatggaaaccaaacagcagcaaggtactagggagatcccccctcaccatcctgcaggatgacaactcccctggcaccctgacactacgacagggtaagcggccttcacccctaagtgaaaatgttagtgaactaaaggaaggagccattcttggaactggacgacttctgaaaactggaggacgagcatgggagcaaggccaggaccatgacaaggaaaatcagcactttcccttggtggagagctaggccctgcatggccccagcaatgcagtcacccagggcctggtgatatctgtgtcctctcaccccttctttcccagggatactgaggaatggcttgttttcttagactcctcctcagctaccaaactgggactcacagctttattgggctttctttgtgtcttgtgtgtttcttttatattaaaggaagtaattttaaatgttactttaaaaaaaaaaaa

SEQ ID NO: 48 - DNA, 6607 bp, Homo sapiens
  CDS (81)..(1544)
acacgaaaggcaccccggagattgctttctggggaagcaatgctggggtgaaaacaacacggctagaagctcattctgaaatggggagcactgaaattttggaaaaggagaccccagaaaatctcagtaatggtaccagcagcaatgtggaagcagccaaaaggttggccaaacgcctttatcagctggacagattcaaaagatcagatgttgcaaaacaccttggcaagaacaacgaatttagcaaactagttgcagaagaatatctgaagttttttgattttacaggaatgacgctggatcagtcactcaggtatttctttaaagcattctctcttgtgggagaaactcaagaacgagagagagttttaatacacttctccaatagatatttttattgtaacccagataccattgcttcacaagatggagtccattgccttacctgtgcaataatgcttcttaataccgatctacatggccacaatattggaaagaagatgacctgtcaggagttcattgcaaatctgcaaggggtaaatgagggtgttgatttctccaaggatctgctgaaagctctgtacaactcaatcaagaatgagaagcttgaatgggcagtagatgatgaagagaaaaaaaagtctccctcagaaagtactgaggagaaagctaacggaacacatccaaagaccatcagtcgtattggaagtactactaacccatttttggacattcctcatgatccaaatgctgctgtgtacaaaagtggattcttggctcggaaaattcatgcagatatggatggaaagaagactccaagaggaaaacgaggatggaaaaccttttatgctgtactgaagggaacagttctttacttgcaaaaggatgaatacaagccagaaaaggccttgtctgaagaggacttgaaaaacgctgtgagtgtgcaccacgcattggcatccaaggccacggactatgagaagaaaccaaacgtgtttaaacttaaaactgccgactggagggtcttgctttttcaaactcagagcccagaggaaatgcaagggtggataaacaaaatcaattgtgtggcagctgtattttctgcaccaccatttccagcagcaatcggctctcagaagaagtttagccgcccacttctgcctgccactacaacaaaactgtctcaggaggagcaactgaagtcacatgaaagtaagctgaagcagatcaccaccgagctggccgagcaccgctcatatccccccgacaagaaggtcaaagccaaggacgtcgatgagtacaaactgaaagaccactatctggagtttgagaaaacccgctatgaaatgtatgtcagcattctcaaggaaggaggcaaagagctactgagtaacgatgaaagcgaggctgcaggactgaagaagtcgcactcgagtccttcgctgaacccggatacttctccaatcactgccaaagtcaagcgtaacgtgtcagagaggaaggatcaccgacctgaaacaccaagcattaagcaaaaagttacttagagtccatctgcggccaggaagtgctggtcatggagcaaaatagggtttttcaagatctttctggtaatccgtgaatatatttaaaaaaaaaaaagtctgtgacaaaacggtgcattagtaattttttctattgtatatttttgttagtttctgtacagattgtctttgctcttgatttcttttgctttgatgatttttgcaacttgatagctaatgcaccttttctgtgaggaggaggggatcgtgatttcagaatgaattatgtatcccttctcttttggttttctcttgtttgcagtctgctcagttgttttatgtattctcatatcaactgttaaacttttttttaaggttaaagaatttaatccattgtgaaacacttaactggacaaactgtagttttagtaaattctagctggagttaatatacgcctttatatgtgaaatcttgcccagtcacagaggtagaattgagcactcacagatgctccagtaagaatcacagtgctgggaatctagttgctccaatatgaggcagcttcatgtgcagcttagcacttgttgttgagatcggaccctgctggaagcagggaaaagaagcgtgaagatcgtaggattgagaacttagggaagcacattagcttgcttgaagtgctgattccatttcagccaagcaagggaaagaggaagtggagtcattttgcctttgaaggctgaggaaagattgatacccagttaattttgtttgctaaaggatgggggcaataatcggcccttgaggagctgcagcagtaggcatgtgctcagtctgcaggaattgttacctcactcccacagggtctagactagaaatccatcatctctatcgttgatatccttccatccaggaatagatttttcttactctacatatgtgtgtgtgcgtgcgtgtgtgtgcgtgtgtgggcatggggttgtgtcctggttgtgatattgaggtcttccttcctaacaaattaatactaaaatgaaacagcttttcttgtgtccttaagacaaaataaggaaggaaaacgtagctgcagttgtccacgatggatattggttctttaaaatatatctgaaagtagtagtcagaatgaattatggttggaaaactgaggaatcttctggttgcaggtgcaaagtgactttgtttattcttgtctcagtctccttgatagccacttcactctgctactactcaactttctcctaaaaatacttcatctattttcagtcctttctttctgtctactcaaaatggttctattaactttgcagtcatgagcttgttccagttacagtccctttgaagttcagggtgataaacagaatattcttctgtagaggaagagaaaggagtgaaagtttagcccactgagacctagagctttgtgatttcctaaccttgaaactctgtaatccctaaagttaaaatctccgcaagtggcacaacttcagaactaatagtatcactttgatttttctttttcctcccttagaaagtttctctagttctatagtttatttgttgaaggtactatgaccaaagaatcagctgctctacaggaatagcatggttccagtgaattagagaaaacctgctgtaaagccatggtagtgtctaagtggtatgttattatgatgtactagcatttatttacagaattatttattaacgtttacttccttcccctctgtaaatgtccatgactattgcccagagaaggcttacccctctctagggttgcagttgctttctttgtaataagtattttgccacacctgtaaaaaaaaaaaacctcacttttaactctctgccttgtttgggtaaaggcagtaactaagtttatgtttcagaactgcaaaacaaacaggatagttaccaatatggcccatgtgtcagattgatttttgtagcctctcactgaatccaacatatccacaagcaagttatctgtctttctacctgataatctaaattatcaggatatttgttttctgcctaaatgtttatactaagccgaggggagagaggtacctagaccatgtcatctacgagcttcagtaactaaagaaaaaggaacttccctgagtggcttgaatgtgtttgcccacagtctatatctatgtatatagaatgtctgtatgtattttacttatttaatatacattgaatggtaccttgctacagtatttctgacatttagagtagtgttgaaatactcggctagcatcagcaccactatagcactgtccgtgtcatatgagtcactaatattaactccagggacttctggataggctaatagatcattggatacgaagggctcttttgaagcttcagtataccatgtttgcatagtttatctttaaaaacaactttaaaggttcttttgtgagccaggatctcagactgccgtagcatgatgctgtccatctttagcgcatgggctgagaacacctcttccctgaggcttctgaaggttgctgtctgtcatgagtgcatgaaggaggccaagagtttatgctatgggaggaaacagtcactgatttgcctagattctgagagtctggcccatagccaaccacattttcctttgggataatttatttcctgtggcatctagccagaagaaattgaggatgtttcctttcacagctgctccaagcctgttgcccaattcacggtacaagggagcaccccttccctttcctctgaaggtacgccacccacctccgtcgcccacctcagcgcccaggagccttgggacttccttccatatgataaatcattcttcttcacgtcaatacacttcatattaatttctagtacagaaaatcttgacagctatcagaatgccttggtcatagtgttgttgcaaaattgaccatacaggtggcccatgtataaaatctgaattttaggggtttgtccccacctcgcatgctggcttttacagggaggtgtctgggattcctcattagcaatcaaaacttaattactgggatgcagagtccttactttatcgccagcccgtaggcatttctgaagtgcacttttttgaaacatcattttgctaactctcagcagtgtctaattaaactgagcaatacttttgtgaattttaattaatctcagcaaaaccatgatgggagagagtcctctgatggaaatgtagtccctggattatgtgtaacctttttattgctcttagatgcagaggatagaaagcattttttggtgcagtggtcttgtggcaaacacaagaccctctatgcgtctccaactgttatcctaatctagaaaatgaggactggcccctgggcaaaagtgacatgaggaatttactctggaagaggaaaatctgggtggctttccaaggctaagataggtttgtatttcaccctgtggccaagctacagaacttctgagattgtggaagaatttttgcaaccagcagggaaagaggcctcttactgcctaaacacaaagttacactgagcttttctactgtcctttgcctattgctccctctatcatgtaaagatctgggaaggatgagaggcagggcctgcttgtcatgagctgcactcttttctttttaactaatcattgacaattggaagaaaattgacgttaaagaagtttctccattgtcttactaacaaaaccttttgggtttcattaattgtccttgaaattgagttcctttggcatttttccttgcagtcatcagttaagcatgttgcatcctgaattcacagaagtttagctttgcaggtttgaatctctgtaatttaactcccgtggacttggtcgagttttcagcaggttgggagccacctctcttcatttcagcagtgagtcatcccttgacttttcaaatgacagaattttttccaattgtaaaattagcactgtaaaacaaagaaccaaagtggcatcctaagagttgttaaacctgaagtctagtttatgaggaattgtccaagttggagtttaaatagtatctgcttttgtctcaaagcatctaagttattctgacagaaaatggtaagtcagctttgcaggcagatgcgcctctgggcctcctaccttgctccacagctttctggccatcttgtctcccaggccatgccactgctctgccacatgtcagcaaatttctttccaccagtcttatagcatcttacatgatcaaatcatcacagaataaccccgtgatagattattgatagcaatagagaggggcggctttgtcactgatttttctctcagattccttttccatctctcatccataaaggaaggactgaaatccaaaggcattctccttttgtacctacagtatccagaacccacgtgggcagccttctgcttatgacaataattggcccattgcatgcagagagaatgtcttcatagagagaatgtcattaaatacttgaatctgcatgacagtttgacttgaatgcaacagcaggaaaattttgcaagttacataattgtatatacagtaggttttcttaagtctcttcggttcatcctttgtaatttgtgtgtgtatctgtagtattgcaggcttttggagactattcttacaggcagtatgtcagtcatcaaagaaaatgctgtcacctgccattgttgtatttgtgggtatttatagttgtatgtatgtaaatgcatcagtgtgtagattgcatatcagtgtatggtacatgtacatcaaaattatttttgtccttaatcagtgtgatatgaaaagcaagtacaacctcataggactgattatataatgaagttgttgagagtatatatagtggtattgttttattaaacttaaactcaaataatattttgattaaaatttttaataagactttatgctagaaaattctttgagctttgaatcaccagggcaaaaatgactttcaactaaccttgtgaatcttttgcagtgtactgtgtgcaataccaagggcatagctccctgtaatttgggaaatacagaaagaaaagaaaaaaaaaaaaa

SEQ ID NO: 49 - DNA, 4173 bp, Homo sapiens
  CDS (3)..(704)
aaatggcggcttccaggtgggcgcgcaaggccgtggtcctgctttgtgcctctgacctgctgctgctgctgctactgctaccaccgcctgggtcctgcgcggccgaaggctcgcccgggacgcccgacgagtctaccccacctccccggaagaagaagaaggatattcgcgattacaatgatgcagacatggcgcgtcttctggagcaatgggagaaagatgatgacattgaagaaggagatcttccagagcacaagagaccttcagcacctgtcgacttctcaaagatagacccaagcaagcctgaaagcatattgaaaatgacgaaaaaagggaagactctcatgatgtttgtcactgtatcaggaagccctactgagaaggagacagaggaaattacgagcctctggcagggcagccttttcaatgccaactatgacgtccagaggttcattgtgggatcagaccgtgctatcttcatgcttcgcgatgggagctacgcctgggagatcaaggactttttggtcggtcaagacaggtgtgctgatgtaactctggagggccaggtgtaccccggcaaaggaggaggaagcaaagagaaaaataaaacaaagcaagacaagggcaaaaaaaagaaggaaggagatctgaaatctcggtcttccaaggaagaaaatcgagctgggaataaaagagaagacctgtgatggggcagcagtgacgcgctgtggggggacaggtggacgtggagagctctttgcccagctcctggggtgggagtggtctcaggcaactgcacaccggatgacattctagtgtcttctagaaagggtctgccacatgaccagtttgtggtcaaagaattactgcttaataggcttcaagtaagaagacagatgttttctaattaatactggacactgacaaattcatgtttactataaaatctccttacatggaaatgtgactgtgttgctttttcccatttacacttggtgagtcatcaactctactgagattccactcccctccaagcacctgctgtgattgggtggcctgctctgatcagatagcaaattctgatcagagaagactttaaaactcttgacttaattgagtaaactcttcatgccatatacatcattttcattatgttaaaggtaaaatatgctttgtgaactcagatgtctgtagccaggaagccagggtgtgtaaatccaaaatctatgcaggaaatgcggagaatagaaaatatgtcacttgaaatcctaagtagttttgaatttctttgacttgaatcttactcatcagtaagagaactcttggtgtctgtcaggttttatgtggtctgtaaagttaggggttctgttttgtttccttatttaggaaagagtactgctggtgtcgaggggttatatgttccatttaatgtgacagttttaaaggatttaagtagggaatcagagtcctttgcagagtgtgacagacgactcaataacctcatttgtttctaaacatttttctttgataaagtgcctaaatctgtgctttcgtatagagtaacatgatgtgctactgttgatgtctgattttgccgttcatgttagagcctactgtgaataagagttagaacatttatatacagatgtcatttctaagaactaaaattctttgggaaaaaccctcaattgtgattttaataaattaaaagtagcacattacatggttaaaaaatgtcagtgttaaagaatggtacaaagtgaaaagtgtatccctctcttgccgccggtggtagcttgtcccagtggaagctgctgttaacaatttgtgcccccacatccccctccctgcccatccaccaaaaaaaagtacatttacttatgtaaatgtacttatggtgatgtatgtttgttttggcctcacagcatctgtttccccttaatttggtagctgctcacatttccctcgaaagaaccacaccctctgcattctcagttctttgctttggatgggacatttgccctgcagtccccccaccctccaggccatgccctctccagggtgaggcctgtgtgatctaccgtactagggtactaggccctgaaagaggcttttcttgttcctcttgcatcttgaacctggagcgggagctgttgtaggccccgcccttggagaagagaactgtctgacagtggggagagagcgccacaccctggtggcataaacgagtccctgaatcatgccgtggctgaaccaagccctgtctgtgggctttttctgttgtactcagggcagtttgatggggttactgtcctgcatagccataatggcccagtataaagcagctgttttgatgagataattgctttaattaagcaaaaggtagcaaagctttcactccgccctgtaccttctgtttccacttaggagccttcccatgtcagaatgtgcagatctgtctcattgtttcctgtgcagtgtgcccccacttcacccagtagtttctgtgtgtctgttatgtactaggtactacaaggtgccaggacggtgtagatacagcctctgctatcgtaaaactcaatgattcggtgggggaagacaaatgtcagtaatgtacaaagtaaaatggcagctgttagaagtatgaaaggggcagggtagggggaggtagaatcttccctgaccaggttaagaaaaccagaggccttctctgagggcaagaggaggagaggagaaatagagtaaggcaggcagaggaaacagtctgagctaagaccctgtggctagaagtggcagagggagaggcagcaggaaggccagcggggaggctggggcccagtgcaggcccaggttggaggagcgtagcacatggagtttggtaggagtttgggacgccctggtggatcttaattgtgatggggtgggtgtgaaaggcagtccaggttgcactggttgcacaggagaagtgatcagaagaggaccccagcaggtgtgagccgtgagctgggaggtgcttcagtagtgcaggccatagctgaaggtgtcctacatcagcagggtgatggtgaggtttgaaccactgtttcactgcatagtccctgctgatggacacttgagtgttcagattttttgctggtatattcagtgctgcagtggacattttcatacaaaatatttcggtacacttttgtttatatctgaaaggtaaattcctagcagtagaattattagagcaaacggaatttaacattttggtgtgtattgccaaattgccctcccaagtggtttagtcagcttacccttgccaacaatagatctatccttgccagccttgggcatcacatttaccagtttaatagattgtaaaaccatatcttaattggctaccctgaagccaccatactggagaggctgcgtacagtgtttcacgtagagagagggatacccaggaggcccacctgctccaaccccagctgcatgagtcttcccagcccaggcacagacatgtggataagatttaaacatttccagccccagccttcaagcaatcctagttgacactgaggggagccaacataagctgagctgagaaacagtctgcccagtctgcagattcatgagcaaaagaaatgttgggctgggtacagtggctcacgcctgtaatcccagtactttgggaggccgaggtgggtggatcagttgaggtcaggagtttgagaccagcctggccaacatggtgaagccctgtctctactaaaaattagccgagtgtggtggtgcgggcctgtaatcccagctactcaggtggctgaggcaggagaatggcttgaacccgggaggcggaggttgcagtgagccaagatcaggccactgcactccagcctggatgacgggatgagactctgtctcaaaaaaacgaaacaaaaattttttaagagaaatgtcatttgtttttgtttttgagacagggtctcactctgttgccctcactagagtgcagtagggatcacggctcactgaagtctctacctaccggctcaattgatcttcccaccacagcctcccaaatagctgggagaaatgtcctgtttttaatgaatttgtcttcctttttgtcttgtttgttttaatatctagtgatctaataaatttggatgatatcttttgactatc

SEQ ID NO: 50 - DNA, 911 bp, Homo sapiens
  CDS (94)..(525)
cgcgggctgtctcggaaactcagagccgggttcctcccgggtttctgccgggtttctccctgcggctcctgggttgttgagactcttgtgaagatggcttgcgctgccgcgcggtccccggccgaccaggacaggtttatttgtatctatcctgcttatttaaataataagaagaccatcgcagagggaaggcgaatccccataagtaaggctgttgaaaatcctacagctacagagattcaagatgtatgttcagcagttggacttaacgtatttcttgagaaaaataaaatgtactctagagaatggaatcgtgatgtccaatacagaggcagagtccgggtccagctcaaacaggaagatgggagcctctgccttgtacagttcccatcacgtaagtcagtaatgttgtatgcagcagaaatgatacctaaactaaaaacaaggacacaaaaaacaggaggtgctgaccaaagtcttcaacaaggagagggaagtaaaaaagggaaaggaaagaaaaagaagtaacctagtatcagcatcaagtatgtggtactactgtaagagacatgaatggagacttctaatttgtatcggagggaaacagaagctttttgtttgcatcatttaactgaactgtgaacccttgtgcctctcatctttatcatcggagttgacagtgaaacaaatttacatcagaagtttgcatctcgcgtatatgccgtataaaagaatttttttgtctttcaatgcagttttttggaagaaaatatttttaaatggacaatggactgtacaataagttacttgaaataagttgtttcagataaatttcaattagatttaaaataaacattatgtccaccttttaagttaatgaaataaaatttgaaactgacaaaaaaaaaaaa

SEQ ID NO: 51 - DNA, 2346 bp, Homo sapiens
  CDS (86)..(1561)
tctgacgacgcaattcggcacgagggtggcgctggcggttgctgtcagctgattcccggggttggtggcagcggcggtagcagcaatggactttctcctggggaacccgttcagctctccagtgggacagcgcatcgagaaagccacagatggctccctgcagagcgaggactgggccctcaacatggagatctgcgacatcatcaacgagacggaggaaggtcccaaagatgccctccgagcagtaaagaagagaatcgtggggaataagaacttccacgaggtgatgctggctctcacagtcttagaaacctgtgtcaagaactgcgggcaccgcttccacgtgctggtggccagccaggacttcgtggagagtgtgctggtgaggaccatcctgcccaagaacaacccacccaccatcgtgcatgacaaagtgctcaacctcatccagtcctgggctgacgcgttccgcagctcgcccgatctgacaggtgtggtcaccatctatgaggacctgcggaggaaaggcctggagttccccatgactgacctggacatgctgtcacccatccacacaccccagaggaccgtgttcaactcagagacacaatcaggacaggattctgtgggcactgactccagccagcaagaggactctggccagcatgctgcccctctgcccgccccgcccatactctccggtgacacgcccatagcaccaaccccggaacagattgggaagctgcgcagtgagctggagatggtgagtgggaacgtgagggtgatgtcggagatgctgacggagctggtgcccacccaggccgagcccgcagacctggagctgctgcaggagctcaaccgcacgtgccgagccatgcagcagcgggtcctggagctcatccctcagatcgccaatgagcagctgacagaggagctgctcatcgtcaatgacaatctcaacaatgtgttcctgcgccatgaacggtttgaacggttccgaacaggccagaccaccaaggccccaagtgaggccgagccggcagctgacctgatcgacatgggccctgacccagcagccaccggcaacctctcatcccagctggcaggaatgaacctgggctccagcagtgtgagagctggcctgcagtctctggaggcctctggtcgactggaagatgagtttgacatgtttgcgctgacacggggcagctcactggctgaccaacggaaagaggtaaaatacgaagccccccaagcaacagacggcctggctggagccctggacgcccggcagcagagcactggcgcgatcccagtcacccaggcctgcctcatggaggacatcgagcagtggctgtccactgacgtgggtaatgatgcggaagagcctaagggggtcaccagcgaagaatttgacaaattcctggaagaacgggccaaagccgcggaccgattgcccaacctctccagcccctcagctgaggggcccccgggtcccccatctggcccagcgccccggaagaagacccaggagaaagatgatgacatgctgtttgccttatgagtgtggggtctggcaccctgcagcccaggtccccactgctctcacacccttaggctgggacctccctccctcctctggtgttaaggctgctttgggggtggcttgttacccccttttcctcctctttgaagacggagctgccccagctgtggctgggggtgtggaggcagtgggatgaactgggggacaggtctgcgctgcagtgggatctggctgctctgcctcctttcccaccccagctgaccatgagactttgctgagaagtggaggccccaggacaggctggctggctggctggctgcttgacccagtgtgactctccttcactgagtgataccctgctccgggcccatgccccaaggagcccttcagagcccacactgccagtcgaggcctggctggaggctggccacagtggaaattctgccgagcctcttgtcccttccctgctctgctgcatggggccccatggctttggctggccactgagggtagggtgtggaggtgtggaggccccctgaggagctgcggcggcccaggtacgaagctgcaactctgcgcgcagtgggcgagatctcatcagccccaggctgcaggtgaggcttcaggggatgctgggccccactgcccctccgctgccttgccctccatccttcctctgttccttctggccgggcaccacagcactggggctcacctcttggttgatcctcttgtactgggagaggtgccttttgtatccccaattaaaggtagaaaaccaccctgctaaaaaaaaaaaa

SEQ ID NO: 52 - DNA, 762 bp, Homo sapiens
  CDS (313)..(489)
aagtattgaaatgtctttttaaaattttaaccaccgtatttattggttcaaaaactagaatttatagtttcaggcagatttcaaccaaagagtcaccaaattaaatacacagggtagcttgtgaggcatagacacagcccatgtgttttcctctacattgtatattcatttctctttggcgatttgacattatagccattctctggaagtcctaaagcaaactagtattttatgtgccatattaagttaaaatttcttatgtgagataccactaatactggttttgatttaggccatccttcttgcctggatatgacaatggagcttgtttctatgattaagacctacccatggcagtgtatggaatgtaaaacatgcattatatgtggacaaccccaccatgaagaagaaatgatgttctgtgatatgtgtgacagaggttatcatactttttgtgtgggccttggtgctattccatcaggtaaagattaaaaaaagagcaaacattatctttgggtgatgagactctcccagcactccaaaaggctgcataaacgctatcatgacatgaagagcttgtggactcttatgtgcaaatatgaccaaagctgtgattatacaggtcatgtccaccagcttttcatccctagacaattccaactaaaggataagtgaaaggccagaatgcccctgctaagttttggaagtatagttctatagaatgagctggtgtttttctactgaaatactaaagtaacaaag

SEQ ID NO: 53 - DNA, 537 bp, Homo sapiens
  CDS (208)..(321)
aattagtttcagtggcttgattctaggccaagattctggcaacagattgtagtcttaccttgttttcttcaatctcactggatctctctctctttttaccccccttaggctgagggtaaaaagctgggattggtaggctgggtccagaacactgaccggggcacagtgcaaggacaattgcaaggtcccatctccaaggtgcgtcatatgcaggaatggcttgaaacaagaggaagtcctaaatcacacatcgacaaagcaaacttcaacaatgaaaaagtcatcttgaagttggattactcagacttccaaattgtaaaataatggcctgaatttaagttttctaagataaactcagtggtttggtttttattattaatagagatagaactattgtgtgttaatgttagcattagtcaataagttattttaatgtcagatttttgaatgttattatatattacctgtatgatggaaggattaccactgtacacaaatctaatcaataaaaacgttagaaccttcaaaaaaaaaaaa

SEQ ID NO: 54 - DNA, 509 bp, Homo sapiens
  CDS (201)..(413)
ttcttgttaaagccaaaaaaactttccagacagaataaaacataaatcaaactatatgcccaagagccacatctgaaacaggctggacgcaaaatgatgaaagacacattggtcaaattccaaccaaatgactatcatatgaagtacactttgttttatctcatttttattattcttatcttttatatatattttttgagatggagtctcactctgtcacccaggctgcagtgcagtggcaccatctcggctcactgcaacctctgcctcccgggttcaagcaattctctgcctcagcctgccgagtagctgggattacagatgcccgccaccatgcctggctaatttttgtatttttagtagagacggggtttcaccatcttgggcagtctggtcttgaactcctgatctcatgatccacccgccttggcctccctaagtgctgggattacaggcatgagccaccacacccagccatgaagtataggtcgaccggccgcgaatttagt

SEQ ID NO: 55 - DNA, 2993 bp, Homo sapiens
  CDS (1)..(1641)
atgatcgctgatgataagccagctgcgatggctggtgagtcagctggacagtcatctgagtctggagttggggccaacttctttggcatcacattccagacaacagaaacactgatgagcacagggcatctgaatggggccgaatgcaaagcaggtccaggcactgtgaagaccctggcggtggaggaagaggcttcccggctgtggaggaagccagacccttacaacacaagacgagaaccagacctgcgtgggggagctctggatgctacaggggctcaaggagggccactggaccgagcgcgcaaagaacctgagaccgcttgctctcaccgccgcaagtcggtcgcaggacagacaccagtgggcagcaacaaaaaaagaaaccgggttccgggacacgtgccggcggctggactaacctcagcggctgcaaccaaggagcgcgcacaatgctccgatacagggggtctggatccctactctgcgggccatttctccagagcgactttgctcttctgtcctccccacactcaccgctgcatctccctcaccaaaagcgagaagtcggagcgacaacagctctttctgcccaagccccagtcagctgttttcgggtccgagggaaggaggaccctgcgaaagctgcgacgactatcttcccctggggccatggactcggacgccagcctggtgtccagccgcccgtcgtcgccagagcccgatgacctttttctgccggcccggagtaagggcagcagcggcagcgccttcactgggggcaccgtgtcctcgtccaccccgagtgactgcccgccggagctgagcgccgagctgcgcggcgctatgggctctgcgggcgcgcatcctggggacaagctaggaggcagtggcttcaagtcatcctcgtccagcacctcgtcgtctacgtcgtcggcggctgcgtcgtccaccaagaaggacaagaagcaaatgacagagccggagctgcagcagctgcgtctcaagatcaacagccgcgagcgcaagcgcatgcacgacctcaacatcgccatggatggcctccgcgaggtcatgccgtacgcacacggcccttcggtgcgcaagctttccaagatcgccacgctgctgctggcgcgcaactacatcctcatgctcaccaactcgctggaggagatgaagcgactggtgagcgagatctacgggggccaccacgctggcttccacccgtcggcctgcggcggcctggcgcactccgcgcccctgcccgccgccaccgcgcacccggcagcagcagcgcacgccgcacatcaccccgcggtgcaccaccccatcctgccgcccgccgccgcagcggctgctgccgccgctgcagccgcggctgtgtccagcgcctctctgcccggatccgggctgccgtcggtcggctccatccgtccaccgcacggcctactcaagtctccgtctgctgccgcggccgccccgctggggggcgggggcggcggcagtggggcgagcgggggcttccagcactggggcggcatgccctgcccctgcagcatgtgccaggtgccgccgccgcaccaccacgtgtcggctatgggcgccggcagcctgccgcgcctcacctccgacgccaagtgagcctactggcgccggcgcgttctggcgacaggggagccaggggccgcggggaagcgaggactggcctgcgctgggctcgggagctctgtcgcgaggaggggcgcaggaccatggactgggggtggggcatggtggggattccagcatctgcgaacccaagcaatgggggcgcccacagagcagtggggagtgaggggatgttctctccgggacctgatcgagcgctgtctggctttaacctgagctggtccagtagacatcgttttatgaaaaggtaccgctgtgtgcattcctcactagaactcatccgacccccgacccccacctccgggaaaagattctaaaaacttctttccctgagagcgtggcctgacttgcagactcggcttgggcagcacttcggggggggagggggttttatgggagggggacacattggggccttgctcctcttcctcctttcttggcgggtgggagactccgggtagccgcactgcagaagcaacagcccgaccgcgccctccagggtcgtccctggcccaaggccaggggccacaagttagttggaagccggcgttcggtatcagaagcgctgatggtcatatccaatctcaatatctgggtcaatccacaccctcttagaactgtggccgttcctccctgtctctcgttgatttgggagaatatggttttctaataaatctgtggatgttccttcttcaacagtatgagcaagtttatagacattcagagtagaaccacttgtggattggaataacccaaaactgccgatttcaggggcgggtgcattgtagttattattttaaaatagaaactaccccaccgactcatctttccttctctaagcacaaagtgatttggttattttggtacctgagaacgtaacagaattaaaaggcagttgctgtggaaacagtttgggttatttgggggttctgttggctttttaaaattttcttttttggatgtgtaaatttatcaatgatgaggtaagtgcgcaatgctaagctgtttgctcacgtgactgccagccccatcggagtctaagccggctttcctctattttggtttatttttgccacgtttaacacaaatggtaaactcctccacgtgcttcctgcgttccgtgcaagccgcctcggcgctgcctgcgttgcaaactgggctttgtagcgtctgccgtgtaacacccttcctctgatcgcaccgcccctcgcagagagtgtatcatctgttttatttttgtaaaaacaaagtgctaaataatatttattacttgtttggttgcaaaaacggaataaatgactgagtgttgagattttaaaaaa

SEQ ID NO: 56 - DNA, 866 bp, Homo sapiens
  CDS (310)..(510)
cccggtcgacccacgcgtccgcggacgcgtggggcaatatatacactattatatacccacaaaaaataaaaataaaggctgggtgccatggctcacacctgtaatcccaccacttcaggaggcctgaggtcgggagtttgagaccaacctggccaacatggagaaaccacgtctctactgaaaatacaaaatcagctgggcatggtggtacatgcctataatcccagctactcgggaggctgaggcaggacaatcgcctgaaccctggaggtggaggctacggtgagccgagatcgtgctgagagcaagatgggtcaccagcagctgtactggagccacccgcgaaaattcggccagggttctcgctcttgtcgtgtctgttcaaaccggcacggtctgatccggaaatatggcctcaatatgtgccgccagtgtttccgtcagtacgcgaaggatatcggtttcattaagaaagacctgagctgtcttccttggcactgcctatggaggtgacacccatctcctccatcatggccatcctgagaccgctcgcgaagcccaagatcatcaaaaagagcaccaagttcactgggaaccagtcagactgatatgtcaaaattaagggtaactggtggaaacacagaggtattgacaacagggttcatagaaggtttgagggccagatctatgcccaacattggttatgggagaaacaaaaagacaaagcacatactgcccagtggcttctggaagttcctggtccacaacgttaaggagctggaagtactgctggtgagcaacaaatcttactgtgttgagatcactcatgatgtttcttccaagaactgcaaagccatcttggaaag

SEQ ID NO: 57 - DNA, 676 bp, Homo sapiens
  CDS (175)..(396)
atttggccctcgagcagcaaattcggcacgaggagcggctggagaggtggtcggagaagtaggaacctcctgccgggctcgtggcggcttctgtccgctccgcgagggaagcgccttccccacaggacatcaatgcaagcttgaataagaaaaacaaattcttcctcctaagccatggcatatcagttatacagaaatactactttgggaaacagtcttcaggagagcctagatgagctcatacagggctctctaaatacgtacagattctgcgataatgtgtggacttttgtactgaatgatgttgaattcagagaggtgacagaacttattaaagtggataaagtgaaaattgtagcctgtgatggtaaaaatactggctccaatactacagaatgaatagaaaaaatatgacttttttacaccatcttctgttattcattgcttttgaagagaagcatagaagagactttttatttattctagaattgcagaaatgactacactgtgctataccagagaattccagtagaaagaaacttgtaactctgtagcctcttacatcacctttattatacagcatgaaaaaccataacttttttttaaggacaaaagttgttgccttcctaagaaccttctttaataaactcattttaaaactctgaaaaaaaaaaaa

SEQ ID NO: 58 - DNA, 1915 bp, Homo sapiens
  CDS (518)..(1021)
tgcgcggcttcccggcgctcgtggaatcttctggagcccttttctccactcagcgagcctgagagtgcggaagtctccggctggtggggcatggcccaggagcactagtgatgatgcgggtgtgctggttggtgagacaggacagccggcaccagcgaatcagacttccacatttggaagcagttgtgattgggcgtggcccagagaccaagatcactgataagaaatgttctcgacagcaagtacagttgaaagcagagtgtaacaagggatatgtcaaggtaaagcagagtttgaggaagaggcaaagaaccctggcctggaaacacacaggaagagaaagagatcaggcaacagtgattctatagaaagggatgctgctcaggaagctgaggctgggacagggctggaacctgggagcaactctggccaatgctctgtgcccctaaagaagggaaaagatgcacctatcaaaaaggaatccctgggccactggagtcaaggcttgaagatttctatgcaggaccccaaaatgcaggtttacaaagatgagcaggtggtggtgataaaggataaatacccaaaggcccgttaccattggctggtcttaccgtggacctccatttccagtctgaaggctgtggccagggaacaccttgaactccttaagcatatgcacactgtgggggaaaaggtgattgtagattttgctgggtccagcaaactccgcttccgattgggctaccacgccattccgagtatgagccatgtacatcttcatgtgatcagccaggattttgattctccttgccttaaaaacaaaaaacattggaattctttcaatacagaatacttcctagaatcacaagctgtgatcgagatggtacaagaggctggtagagtaactgtccgagatgggatgcctgagctcttgaagctgccccttcgttgtcatgagtgccagcagctgctgccttccattcctcagctgaaagaacatctcaggaagcactggacacagtgattctgcagagcctgagctgctgctgtggtgtggcccactggagcaaactgctggcacctattctgggttgcttgtgaacttctactcatttcctaaattaaaacatgcagctttttcacaaatttattctattattgagtggccacaatgtagagtggctcaaagtacttcaggattaggaatttgggtttgtcatagatgtattctctggtgagggtggctgggatatacctgacccaccatcttcagaaggacccatgtcaggtctgaccattgggagcaaagccatgttcacactgacctaatgcagagtatggaagcattgggctggttatacatttctgtttcttagatttatcctccgcctctgtaggcatggacaacctttaatcagagcatctagagtggcctcttgtttatcctgaagatactgatgggtcttgttttctgttagtctgttttgtaatattcttttcccttccttcatggggaggcttagtttgtccagtccttccatgcccttctatcccagattacctaaatgttcccttctcaggaattctgtctcatcagttcttcacagtgagaaaagaggctagatgatggtgtggggggttggagttttcttctaataccgagggttcctggctgtgaggaaacagccacatgttcgtcatgattgagctgtgaagtcttcttggacctgttgtctgaaaataaagttaatttgtttgaggcatctctcttaagtaggtggaaactattgaagttcagctaacaatcacagcataggttctgatgcatggaaaggtggttggtgaatgaaaaagttgcgtagagccactactttctttttccctgagaataaatttggataaaacaaaaaaaaaa

SEQ ID NO: 59 - DNA, 400 bp, Homo sapiens
  CDS (50)..(343)
ttccggccgcgtcgacgcatcctgtccagcaaagaagcaatcagccaaaatgatacctggaggcttatctgaggccaaacccgccactccagaaatccaggagattgttgataaggttaaaccacagcttgaagaaaaaacaaatgagacttacggaaaattggaagctgtgcagtataaaactcaagttgttgctggaacaaattactacattaaggtacgagcaggtgataataaatatatgcacttgaaagtattcaaaagtcttcccggacaaaatgaggacttggtacttactggataccaggttgacaaaaacaaggatgacgagctgacgggcttttagcagcatgtacccaaagtgttctgattccttcaactggctactgagtcatgatcc

SEQ ID NO: 60 - DNA, 3724 bp, Homo sapiens
  CDS (351)..(3674)
gcggggcactttgaagaatcacgtgtgttgaggccctcttaaagagataggcacctacttttccctccaccctaaacaccgccctgagggcggcggcgaccgtggtaattgcaactgctcaggggcagggcttgccccagcgccgagtagtggcaacggcgtggttgcgtcgggggtgcctgggagcctggagtcccgggggcctgaaatcggcagcttcccgggcagacactctctccctcaggaagaggtgccgccgagtcagcgcggggcagtgtgagcgccccgaggtgctttctcagttgaggagaggtggggttacagggcacaggtgacagggccggagaaagatggagcagcccggggcggcggcgtcgggagcgggaggcggcagcgaggaacccggtgggggccggagcaacaagcggagcgcggggaaccgggccgccaatgaagaggaaacgaaaaacaaacccaaattgaacattcaaataaaaactttggcagatgatgtgcgtgaccgaattacaagttttagaaaatctactgtcaaaaaagaaaaacctcttattcaacatcctattgattctcaagtcgcgatgagtgagtttcctgcagctcagccattatatgatgaacgatctttgaatttgtcagaaaaggaagtattggatctctttgaaaaaatgatggaggacatgaaccttaacgaagagaaaaaagctcctttacgaaacaaagactttaccaccaaacgtgagatggttgtccagtatatttctgccactgccaaatctatagttggaagtaaagttacgggtgggctgaaaaacagcaaacatgaatgcaccctgtcttcacaagaatatgttcatgaattacgatcgggtatatcagatgagaaacttcttaattgcctagaatccctcagggtttctttaaccagcaatccggtcagctgggttaacaactttggccatgaaggtcttggactcttattggatgagctggaaaagcttctggacaaaaaacagcaagaaaatattgacaagaagaatcagtataaacttattcaatgcctcaaagcatttatgaataataagtttggattacaaaggattctaggagatgaaagaagtcttttactattggcaagagcaattgaccccaaacaacccaacatgatgactgaaatagtaaaaatactttctgctatttgcattgttggagaagagaacattctagataaacttttaggggctataacaacagcagcagaaagaaataacagggaacgattttcaccaattgtggaaggtttagaaaatcaggaagccttgcaattacaggtggcctgcatgcagtttataaatgcccttgtcacttctccttatgagcttgattttcgaatacatttaaggaatgaattcctccgttcaggactaaaaacaatgttaccagatctaaaagaaaaagagaatgatgagcttgatattcagttgaaagtatttgatgaaaacaaagaagatgacctaactgaattatcacaccgtctcaatgacattcgagcagaaatggatgatatgaatgaagtctaccatcttctatataatatgctgaaggacactgctgctgaaaattacttcttatctattctacaacattttttgcttatcagaaatgattattatatcaggccacaatattataaaataattgaggaatgtgtttcacagatagtgctacactgcagtggtatggatccagacttcaaatacaggcaaagattagacatcgatttaactcatctgatagattcttgtgtgaacaaggcgaaagttgaagaaagtgaacaaaaagctgcagagttttcaaagaagttcgatgaagaattcacagctcgacaggaagctcaagcagagcttcaaaaaagagatgagaaaatcaaagaacttgaagcagaaatccagcaacttcgaacccaggcacaagtactctcaagttcatcaggaattccaggtcctcctgcagcacctccattgccaggtgtagggccgcctccaccaccacccgcgccacctctacccggaggagctcctcttcctcctccaccacctcctttacctggaatgatggggataccaccaccacccccaccaccacttttatttgggggacctcctccaccaccaccccttggaggagttcctcctcccccaggaatatcacttaatctaccttatggaatgaagcagaaaaaaatgtataaacctgaagtgtccatgaagagaatcaattggtcaaagattgaacccacagaattatctgagaactgtttctggttaagagtcaaagaagacaagtttgagaatccagatctctttgccaaattggcattgaattttgctactcagataaaagttcaaaagaacgcagaagcattagaagaaaagaagactgggcctacaaagaagaaagtgaaagaactgagaattttggatcccaaaacagctcagaatctgtccatctttctgggatcatatcgcatgccatatgaagacataagaaacgttattctggaggttaatgaagacatgctgagtgaggctttaattcagaaccttgtgaaacatcttcctgagcagaagatactcaacgaattagcagagcttaagaatgaatatgatgacctctgtgagcctgaacaatttggagttgtgatgagctctgtgaaaatgttacagcctcgtctcagtagtatcctgttcaagctcacatttgaagaacacataaacaacatcaaaccaagcatcatagcagtaactcttgcctgtgaagaactgaagaaaagtgaaagctttaacagacttttagagttagttcttcttgttggaaactacatgaactcaggctcaagaaatgcccagtctttgggatttaagatcaacttcctttgtaagatcagagatactaaatcagcggatcaaaaaacaacccttttgcattttattgccgacatttgtgaggaaaaatatcgagatatcctaaaatttcctgaagaactggaacacgtagaaagtgcaagcaaagtttcagctcaaattctcaagagcaaccttgcatcaatggaacaacaaattgttcatctggaacgtgacatcaagaaattcccccaagcagaaaatcaacacgataagtttgtggaaaagatgaccagctttacaaagactgcccgagaacagtatgaaaaactctccaccatgcacaacaacatgatgaagctctatgagaatcttggagaatacttcatttttgactcaaagacagtgagcatagaagagttctttggtgatctcaacaacttccgaactttgtttttggaagcagtgagagaaaacaataagagaagagaaatggaagagaagaccaggagggcaaaacttgcaaaagagaaagctgaacaagaaaagttagaacgccagaagaaaaagaaacaactcattgatataaacaaagagggtgatgagactggtgtgatggataatcttctagaagccctacaatcaggtgcagcattcagagaccgtcgaaagcggattccaaggaatccagataacagacgagtacctttggaaaggtcacgctctcgccacaatggagctatctcatctaagtgattcctgatgccaaagaatatgaaaatatttaagtaaaaacaaaatga

SEQ ID NO: 61 - DNA, 417 bp, Homo sapiens
  CDS (28)..(402)
aaattcgcggccgcgtcgaccgcagccatggctcgtggtcccaagaagcatctgaagcgggtggcagctccaaagcattggatgctggataaattgaccggtgtgtttgctcctcgtccatccaccggtccccacaagttgagagagtgtctccccctcatcattttcctgaggaacagacttaagtatgccctgacaggagatgaagtaaagaagatttgcatgcagcggttcattaaaatcgatggcaaggtccgaactgatataacctaccctgctggattcatggatgtcatcagcattgacaagacgggagagaatttccgtctgatctatgacaccaagggtcgctttgctgtacatcgtattacacctgaggaggccaagtacaatttgtgcaagtgagaagattttttt

SEQ ID NO: 62 - DNA, 482 bp, Homo sapiens
  CDS (14)..(424)
ggaaggcttagccatgtcgtccttgatcagaagggtgatcagcaccgcgaaagccccaggggccattggaccctacagtcaagctgtattagtcgacaggaccatttacatttcaggacagataggcatggacccttcaagtggacagcttgtgtcaggaggggtagcagaagaagctaaacaagctcttaaaaacatgggtgaaattctgaaagctgcaggctgtgacttcactaacgtggtgaaaacaactgttcttctggctgacataaatgacttcaatactgtcaatgaaatctacaaacagtatttcaagagtaattttcctgctagagctgcttaccaagttgctgctttacccaaaggcagccgaattgaaattgaagcagtagctatccaaggaccactgacaacggcatcactataagtgggcccagtgctgtgtagtctggaattgttaacattttaatttttacaattga

SEQ ID NO: 63 - DNA, 1242 bp, Homo sapiens
  CDS (7)..(1083)
cgagccatgcggaccgcggaccgggaggcgcgcccggggcttccgtccctgctgctgctgctgctggccggggccgggctgtcagccgcctcgcccccagcagcgccgcgcttcaacgtgagcctggactcggtccccgagctgcgctggctgcccgtgctgcggcactacgacttggacttggtgcgcgccgcgatggcgcaagtcatcggggacagagtccccaagtgggtgcacgtgttaatcggaaaagtggtcctggagctggagcgcttcctgccccagcccttcaccggcgagatccgcggcatgtgtgacttcatgaacctcagcctggcggactgccttctggtcaacctggcctacgagtcctccgtgttctgcaccagtattgtggctcaagactccagaggccacatttaccatggtcggaatttggattatccttttgggaatgtcttacgcaagctgacagtggatgtgcaattcttaaagaatgggcagattgcattcacaggaactacttttattggctatgtaggattatggactggccagagcccacacaagtttacagtttctggtgatgaacgagataaaggctggtggtgggagaatgctatcgctgccctgtttcggagacacattcccgtcagctggctgatccgcgctaccctgagtgagtcggaaaacttcgaagcagctgttggcaagttggccaagactccccttattgctgatgtttattacattgttggtggcacgtccccccgggagggggtggtcatcacgaggaacagagatggcccagcagacatttggcctctagatcctttgaatggagcgtggttccgagttgagacaaattacgaccactggaagccagcacccaaggaagatgaccggagaacatctgccatcaaggcccttaatgctacaggacaagcaaacctcagcctggaggcacttttccagattttgtcggtggttccagtttataacaacctcacaatttatactacggtaatgagcgccggtagcccagacaagtacatgactaggatcagaaacccgagtagaaagtaagtcagcagaagagcgagttcgcccgtgctgtgaaagatgattttttaaaaaatgaaattcttgaagagctgcaccttaaaaaataagacaaagtgaaagtattggattatgttacacacaatgcaggctccttcctcattgaactttacaaccttg

SEQ ID NO: 64 - DNA, 1170 bp, Homo sapiens
  CDS (101)..(754)
aagcccagtacatttcaagttggtcgcggcttgggctccgctttggggaggggcagcaggtttattcactggatctctgaatacccaggccccctccaccatggccagccggggtgggggccggggtcgtggccggggccagttgaccttcaacgtggaggccgtgggcattgggaaaggggatgctttgcccccacccaccctgcagccttctccactcttccctcccttggagttccgcccagtacctttgccctcaggcgaggaaggggaatatgtcctggcactgaagcaagagctacgaggagccatgaggcagctcccctacttcatccggccagctgtccccaagagagatgtggagcgttattcagacaaatatcagatgtcaggtccgattgacaatgccatcgattggaaccctgattggcggcgtctaccccgggagctaaagatccgagtgcggaagctacagaaggaacggattacaattctgctccccaagaggccccctaagaccacagaagataaggaggaaacaatacagaaactagagaccctggagaagaaggaagaagaagtaacttcagaggaggatgaggagaaagaagaagaagaagagaaggaagaggaggaagaagaagagtatgatgaagaagaacatgaagaggaaactgattacatcatgtcatattttgacaatggagaggactttggtggtgacagtgatgacaatatggacgaggctatatactgaagaaggactctggaccctcgtgtctttctttaggatacagagagtaactgtacctattatttgtttcttcagacaagcaaatcatttggtcagagttcatataatctgtctgttccctggagatgggaatagaggatgatgacagtttattttctacacttcccctccttccacatttgtatcacctttgctatcttggggaaagtgcaaaggacaaacatctcaattgtatgaagggagaaaggagaattgaaagaagaactggggttgttagagctgagatgactgtacacatacccctgcccaatttatatagctctttgtggagataattaggggtgggagcagtttgaaggagtaagcctggttttatacttttaaataaagtgtttttatctgtcaaaaaaaaaaaa

SEQ ID NO: 65 - DNA, 396 bp, Homo sapiens
  CDS (54)..(236)
cccgctgcgtgttttcctcttgatcgggaactcctgcttctccttgcctcgaaatggaccccaactgctcctgctcgcctgttggctcctgtgcctgtgccggctcctgcaaatgcaaagagtgcaaatgcacctcctgcaagaagagctgctgctcctgctgccctgtgggctgtgccaagtgtgcccagggctgcatctgcaaagggacgtcagacaagtgcagctgctgtgcctgatgccaggacagctgtgctctcagatgtaaatagagcaacctatataaacctggatttttttttttttttttttgtacaaccctgacccgtttgctacatctttttttctatgaaatatgtgaatggcaataaattcatctagactaaaaaaaaaaaa

SEQ ID NO: 66 - DNA, 2410 bp, Homo sapiens
  CDS (121)..(1113)
gtcccctcagagggttcctgctgctgccggtgccttggaccctccccctcgcttctcgttctactgccccaggagcccggcgggtccgggactcccgtccgtgccggtgcgggcgccggcatgtggctgtgggaggaccagggcggcctcctgggccctttctccttcctgctgctagtgctgctgctggtgacgcggagcccggtcaatgcctgcctcctcaccggcagcctcttcgttctactgcgcgtcttcagctttgagccggtgccctcttgcagggccctgcaggtgctcaagccccgggaccgcatttctgccatcgcccaccgtggcggcagccacgacgcgcccgagaacacgctggcggccattcggcaggcagctaagaatggagcaacaggcgtggagttggacattgagtttacttctgacgggattcctgtcttaatgcacgataacacagtagataggacgactgatgggactgggcgattgtgtgatttgacatttgaacaaattaggaagctgaatcctgcagcaaaccacagactcaggaatgatttccctgatgaaaagatccctaccctaagggaagctgttgcagagtgcctaaaccataacctcacaatcttctttgatgtcaaaggccatgcacacaaggctactgaggctctaaagaaaatgtatatggaatttcctcaactgtataataatagtgtggtctgttctttcttgccagaagttatctacaagatgagacaaacagatcgggatgtaataacagcattaactcacagaccttggagcctaagccatacaggagatgggaaaccacgctatgatactttctggaaacattttatatttgttatgatggacattttgctcgattggagcatgcataatatcttgtggtacctgtgtggaatttcagctttcctcatgcaaaaggattttgtatccccggcctacttgaagaagtggtcagctaaaggaatccaggttgttggttggactgttaatacctttgatgaaaagagttactacgaatcccatcttggttccagctatatcactgacagcatggtagaagactgcgaacctcacttctagactttcacggtgggacgaaacgggttcagaaactgccaggggcctcatacagggatatcaaaataccctttgtgctagcccaggccctggggaatcaggtgactcacacaaatgcaatagttggtcactgcatttttacctgaaccaaagctaaacccggtgttgccaccatgcaccatggcatgccagagttcaacactgttgctcttgaaaatctgggtctgaaaaaacgcacaagagcccctgccctgccctagctgaggcacacagggagacccagtgaggataagcacagattgaattgtacagtttgcagatgcagatgtaaatgcatgggacatgcatgataactcagagttgacattttaaaacttgccacacttatttcaaatatttgtactcagctatgttaacatgtactgtagacatcaaacttgtggccatactaataaaattattaaaaggagcactaaaggaaaactgtgtgccaagcatcatagcctaagccatacaggagatgggaaaccacgctatgatactttctggaaacattttatatttgttatgatggacattttgctcgattggagcatgcataatatcttgtggtacctgtgtggaatttcagctttcctcatgcaaaaggattttgtatccccggcctacttgaagaagtggtcagctaaaggaatccaggttgttggttggactgttaatacctttgatgaaaagagttactacgaatcccatcttggttccagctatatcactgacagcatggtagaagactgcgaacctcacttctagactttcacggtgggacgaaacgggttcagaaactgccaggggcctcatacagggatatcaaaataccctttgtgctagcccaggccctggggaatcaggtgactcacacaaatgcaatagttggtcactgcatttttacctgaaccaaagctaaacccggtgttgccaccatgcaccatggcatgccagagttcaacactgttgctcttgaaaatctgggtctgaaaaaacgcacaagagcccctgccctgccctagctgaggcacacagggagacccagtgaggataagcacagattgaattgtacagtttgcagatgcagatgtaaatgcatgggacatgcatgataactcagagttgacattttaaaacttgccacacttatttcaaatatttgtactcagctatgttaacatgtactgtagacatcaaacttgtggccatactaataaaattattaaaaggagcactaaaggaaaaaaaaaaa

SEQ ID NO: 67 - DNA, 1464 bp, Homo sapiens
  CDS (373)..(1461)
atggcccccgctccgccccccgccgcctccttctcgccctccgaggtccagcggcgcctggcggccggcgcgtgctgggtccgccgcggggcccgcctctacgacctctccagcttcgtgcggcaccacccggggggcgagcagctgctgcgggccagggcgggccaggacatcagcgccgacctggacgggccgccgcacaggcactcggccaacgcgcgccgctggctggagcagtactacgtgggagagctccgcggggagcagcagacaggtgataagcatcccatgcgctctgaaacccaccacatcacagaaacagcccttgctggcgttaccaggaccttcgccttcctccacccggtgggctccatggagaacgagcctgtagcccttgaggaaactcagaagacagatcctgctatggaaccacggttcaaagtggtggattgggacaagaacacagccagtggctgcctgactccccgtgctgaagattggctgagcatccaccgagacaccctcatcctcactccgattgtgtgtggcagattggggcccaccagcatcacagatgagggcactgaggggctccgggaggaaaagatgcacgtccaggatctcacagctggtcaaaggcacagccaggctctaatggacctggtggactggcgaaagcctctcctgtggcaggtgggccacttgggagagaagtacgatgagtgggttcaccagccggtgaccaggcccatccgcctcttccactcagacctcattgagggcctctctaagactgtctggtacagtgtccccatcatctgggtgcccctggtgctgtatctcagctggtcctactaccgaacctttgcccagggcaacgtccgactcttcacgtcatttacaacagagtacacggtggcagtgcccaagtccatgttccccgggctcttcatgctggggacattcctctggagcctcatcgagtacctcatccaccgcttcctgttccacatgaagccccccagcgacagctattacctcatcatgctgcacttcgtcatgcacggccagcaccacaaggcacccttcgacggctcccgcctggtcttcccccctgtgccagcctccctggtgatcggcgtcttctacttgtgcatgcagctcatcctgcccgaggcagtagggggcactgtgtttgcggggggcctcctgggctacgtcctctatgacatgacccattactacctgcactttggctcgccgcacaagggctcctacctgtacagcctgaaggcccaccacgtcaagcaccactttgcacatcagaagtcaggagggtcacatccacttggtggccaggtggcccttggtgacccacttcttcctggagcgtccctgcctagagctcagcccacaggactgcttcaggccgtggccacaggtagcagccgcaaggggaaatga

SEQ ID NO: 68 - DNA, 886 bp, Homo sapiens
  CDS (40)..(618)
ccgagccgagcgcgcggagcagctggggccggggcgcggatgctggaagttcacatcccgtcggtggggcccgaggccgaggggcccaggcagagcccggagaaaagccacatggtgttccgagtggaggtgctgtgcagcgggcgcagacacacggtgccaaggcgctacagcgagttccacgcgctgcacaagcggatcaagaagctgtacaaagtgcccgacttcccctcgaaacgcctgcccaactggaggaccagagggttggaacagcgccggcagggcttggaggcttacatccagggcatcctgtacctgaaccaggaggtgcccaaggagttactggaattcctgagacttcggcacttccccacagaccccaaggctagcaactggggcaccctgagggagttcctgcctggcgacagcagctcccagcagcaccagcggcctgtcctgagcttccatgtggatccctatgtttgcaacccctccccagagtcgctgcccaacgtggtggtgaatggtgtgctccagggcctctacagcttcagcatcagcccagataaagcccagccaaaggcggcctgtcaccctgctcctctgccaccgatgccctgatcagtccagaggcctttggctgcctcctaagaaagtcatgtgcctctgtcctatgaactccatataaggctgggtcctcctttggcctggacccaggacttaattacccagtgcccagttgtgccacattcccactcaaggctcagaacttggctcgcattggtagctggaggtggtagaatttgtatgctcttagagcccaacagccaaggcagggtcaagaagataagtaataaaagaggaagtcagccaaaaaaaaaaaaaa

SEQ ID NO: 69 - DNA, 4181 bp, Homo sapiens
  CDS (229)..(1560)
agtgcggatcccagcggcggccgtgtagctgagcagccctggggcttggttctatgtccctgtggctatgtttccagtgtcctctgggtgtttccaagagcaacaagaaacgaataaatctctggcaaaggcagctcgagcatctcatctgacgtgagttcaagtacagatcacacgcccactaaagcccagaagaatgtggctaccagcgaagactccgacctgagcatgcgcacactgagcacgcccagcccggccctgatatgtccaccgaatctcccaggatttcagaatggaaggggctcgtccacctcctcgtcctccatcaccggggagacggtggccatggtgcactccccgcccccgacccgcctcacacacccgctcatccggctcgcctccagaccccagaaggagcaggccagcatagaccggctcccggaccactccatggtgcagatcttctccttcctgcccaccaaccagctgtgccgctgcgcgcgagtgtgccgccgctggtacaacctggcctgggacccgcggctctggaggactatccgcctgacgggcgagaccatcaacgtggaccgcgccctcaaggtgctgacccgcagactctgccaggacacccccaacgtgtgtctcatgctggaaaccgtaactgtcagtggctgcaggcggctcacagaccgagggctgtacaccatcgcccagtgctgccccgaactgaggcgactggaagtctcaggctgttacaatatctccaacgaggccgtctttgatgtggtgtccctctgccctaatctggagcacctggatgtgtcaggatgctccaaagtgacctgcatcagcttgacccgggaggcctccattaaactgtcacccttgcatggcaaacagatttccatccgctacctggacatgacggactgcttcgtgctggaggacgaaggcctgcacaccatcgcggcgcactgcacgcagctcacccacctctacctgcgccgctgcgtccgcctgaccgacgaaggcctgcgctacctggtgatctactgcgcctccatcaaggagctgagcgtcagcgactgccgcttcgtcagcgacttcggcctgcgggagatcgccaagctggagtcccgcctgcggtacctgagcatcgcgcactgcggccgggtcaccgacgtgggcatccgctacgtggccaagtactgcagcaagctgcgctacctcaacgcgaggggctgcgagggcatcacggaccacggtgtggagtacctcgccaagaactgcaccaaactcaaatccctggatatcggcaaatgccctttggtatccgacacgggcctggagtgcctggccctgaactgcttcaacctcaagcggctcagcctcaagtcctgcgagagcatcaccggccagggcttgcagatcgtggccgccaactgctttgacctccagacgctgaatgtccaggactgcgaggtctccgtggaggccctgcgctttgtcaaacgccactgcaagcgctgcgtcatcgagcacaccaacccggctttcttctgaagggacagagttcatccggcgttgtattcacacaaacctgaacaaagcaaatttttttaaaagcagcgtatgtaagcaccgacacccactcaaaacagctctttcttccgggaaggttattaggaatctggcctttatttttcctcatttctcatgggcaacagaggccaaagaaacgaagcaagacaaacagcaaacaggcattttggtcaggtcatttgtaggcagtttctcttctcacaaaagatgtacttaagcaggctgatcgctgttccttgagcaaggcgcttactctcctccgctcaggcccccaaggccgccctttccctcgcacacaggccccacccccacagttccacgccccccccaccaaggccacaccctccctccctagagcagcagcgaggatccatcatcagaatcacagtgctctccagacctcctctctaaactgcttcattgacctaagtcactctcttcaatcccacacccatggacattcttgtcaactcaataccatagcactttgcataggcaaaatacttttcaggcctttttaaaaaattcattacagcaaacagctggggaaggacatgcagtcctcccccagctctgtcaatgactatgaccttggccaaagcacttcactgctctgggctgcagcttccagcactgaatcagaggccacacagcccaaagattagcttcatgtccattatagcattgagggagcagagatacccatacacagaagcaccttggcatagagcacccaggcatcgacctcttccaggagaactgattctgtggatggatgtgatttcaggagattgtgcagtgccagcatcagtgcataaagggtcctgtatgtcctttggctgcaaatcacccacttccctgtgtttcagtgggagaatttcctctcccacctcctcacatcctcttttgccaggctggatgctgtcgtctctgtacacaaatactttctgcattcccccctccacaccatcctagcgaggcaccagcacacctaatcacagcaaagcccagatccccccatcagttgcttttactcagtgttttcaaataggagtaaaggcccttgcaatttttaattaacaagcaaggcccaagggaacacatgtcctcaaaagtttttctgatccctcgccttgcacacctggcatgcatcaggcacatctgtcctacagctggcagagacagatgcctcggttctttgtcattcagattgcatttgacctcttctcatctatttatttctttatacatccagacttcatcacatgaagcctattggggttaagtttgtaagtgtttaattgtgcaaattgccaccctgtgtacctcctccatgtctgtctgcgtgttttccaccaaagaatgcaaagcagacttccaggtgtttaaattctgttcactcaacaatgccagatgaatggaagagggaacacactgagatgacttagactctggtccaccaaccagacccttggaaaggaatactaaaatcattacaaggtatggattttaaatggatgaaacttcaaattatcttatttggatagaagtctatattctagcctcatttgcatgaagtcagatagccagaagaaattccattgctggttttcacgaaattcacttgtcttttgctaataaacacatggccctttcccagattattctctagccaagccccacctttgttacgttgaaatccctcatttattttcttctcaaaatgcccattatccaaatgcagaacctctgcatctccaagccagttatgctgaatttgtcaaacttagacacccttgacaactgcactcctactgtaggctcctgtgcatactgtcgtcttctgtgggggatggagaggttagtgtgatgaggtggtgtctgcccaggaggtttctttcaaacatcatggcctcccatccaatcaacatcatcaaattacatgtgtaatcaaggctctgtgccatgggggaaatgaatcatttagctaggccaggatctagtgaaagccacagagtttaaaaccatgaaagaagttgaaggcagcattcctcagctctgtgacttgtgaccctatttgaagtttcaggatttgggtgtcacaaaggattgtccctaatccttggccctggggtcttccgagtgagctggtttaatactctgagaatgagcagggagatccagagaatgaatccctgaccgcatcacctaaactgtcttccaaacatgagacaaagctgactgttcacactgattgcccagcacataccgtcttgccagtttcttcttttctcccagtctcctgttcatccattctgttctcccttggggtgggaatctatgatggaggttactggggaaacagctcagcagatttttggagaccaaaccaaaggtctcactaggaaatttatctgttttaaaacattgcttccttcctggctctgctaaattgaatgctcattgtttgttgttgttgttttttaattctaatgttcaaatcactgcgtgctgtatgaatctagaaagccttaatttactaccaagaaataaagcaatatgttcgtaaaaaaaaaaaa

SEQ ID NO: 70 - DNA, 519 bp, Homo sapiens
  CDS (132)..(428)
ggaattcctagggatgcagatgggggaaggggaagctgagaaagcagtgaagacagaatgagctggggaagaggcagatggacggggctgcagcataggagtctcagctgcttacatccaggtccaggattatgtctgctaacagacgctggtgggtaccacctgacgatgaagactgtgtgtctgagaagctcctgaggaagactcgggaatctccactggtgcctataggcttaggaggctgcttggtggtagcagcatacaggatttaccggctgaggtctcgtggttccaccaagatgtccatacacctgattcacacccgagtggcagcgcaggcctgtgcagtgggtgcaatcatgctaggtgctgtgtacacaatgtacagcgattacgtcaagaggatggcacaggatgctggagagaagtaggactccaataggagccggggctgtccaactcccctaactcaatccctggtacattcctaataaagcagttttgaggaaaaaaaaaaaa

SEQ ID NO: 71 - DNA, 439 bp, Homo sapiens
  CDS (10)..(399)
gccgccacaatggtgcgcatgaatgtcctggcagatgctctcaagagtatcaacaatgccgaaaagagaggcaaacgccaggtgcttattaggccgtgctccaaagtcatcgtccggtttctcactgtgatgatgaagcatggttacattggcgaatttgaaatcattgatgaccacagagctgggaaaattgttgtgaacctcacaggcaggctaaacaagtgtggggtgatcagccccagatttgacgtgcaactcaaagacctggaaaaatggcagaataatctgcttccatcccgccagtttggtttcattgtactgacaacctcagctggcatcatggaccatgaagaagcaagacgaaaacacacaggagggaaaatcctgggattctttttctagggatgtaatacatatatttacaaataaaaaaaaaaaa

SEQ ID NO: 72 - DNA, 645 bp, Homo sapiens
  CDS (52)..(459)
attcccagctgtttctgcttgctgatcaggactgcacacagagaactcaccatggagtttgggctgagctgggttttccttgttgctattttaaaaggtgtccagtgtgaggtgcagctggtggagtccgggggaggcttagttcagcctggggggtccctgagactctcctgtgcagcctctggattcaccttcagtagctactggatgcactgggtccgccaagctccagggaaggggctggtgtgggtctcacgtattaatagtgatgggagtagcacaagctacgcggactccgtgaagggccgattcaccatctccagagacaacgccaagaacacgctgtatctgcaaatgaacagtctgagagccgaggacacggctgtgtattactgtgcaagagacacagtgaggggaagtcaatgtgagcccagacacaaacctcgctgcaggggcatctgagaccacgagggggtgtcctgggccctgtgaactgggctgctctccgtggcagcggctggtggtgctaaaggctgattttctctcagcatctggggctgattcatcaagtttcctcagagaacctttcagatttacaattctgtacttacgtttaatgtctctgaatgtgacaaaaaaaaaaaa

SEQ ID NO: 73 - DNA, 1532 bp, Homo sapiens
  CDS (158)..(1486)
gaggcaggggaggctcggcgaccctgtcaggcgctgcgggacgccgaggactggggcggcgtgctggagatccgcggccaaccgtggggtgctgctgtcgggactcataggtgtcgtctcctggaagaggcctctctcccttgtgataacctttttcatgctgctttctgcagtgtgtgtaatgctgaatttggctggttcaattctctcttgtcagaatgctcagctagtcaactccctagaaggctgccagttgattaagtttgacagtgtggaggtgtgtgtctgctgtgagctgcagcaccagtcgtccggctgcagcaacctcggggagacgctgaagctgaacccgctgcaggagaactgcaacgctgtgaggctgaccttgaaggatctcctcttcagcgtgtgtgccctcaacgtcctgtccactatcgtgtgtgcgctggccacagccatgtgctgtatgcagatggtctcctccgatgtcctgcagatgttccttccgcagaggtcacatcctgccaaccccacctgcgtgactcctcacggcaccgttctccaccagaccctggatttcgacgagttcatccccccactcccgcctccaccctattaccccccagagtacacctgcacaccgtccactgaggcccagaggggcctccacctggactttgctccgtctccattcggcactttgtatgacgtggccatcaatagccccggcctgctctatcctgctgagctcccccctccgtacgaggcggtggtgggccagccccctgccagccaggttacaagtataggtcagcaggtggccgagtccagctccggggacccaaacaccagtgctggcttcagcactccagtaccagctgacagcacaagcctcctggtgtccgagggcactgctacgccaggttccagcccatcccccgatggccctgtgggcgccccagcaccctccgaacctgcccttccccctggccgcgtgtctccagaggatcctggcatgggctcacaggtgcagccaggtcccgggcatgtgtcccgctccaccagcgaccccaccttgtgcacatctagcatggcaggcgatgcctcttcacacaggccgtcgtgtagccaggacctggaagcgggactgtctgaggctgtgcctgggagcgcttccatgtctcgctctgccacggctgcctgtcgggcccagctttcaccagcgggggacccagatacctggaaaactgaccaacggccaacaccagagcccttcccagcgacctccaaagagcggccacgctctttagtggacagcaaggcctatgcggacgccagggttttggtggccaagtttttggaacactcacactgtgccctccccaccgaggcacagcacatggtgggtgccatgcgcttggctgtcaccaacgaggagcgcctcgaggaggaggccgtcttcggcgctgatgttctggaccaggtatgaaggagccacatttctgaccgtggacaccaacgcctggcgccac

SEQ ID NO: 74 - DNA, 1529 bp, Homo sapiens
  CDS (1)..(1392)
atgccggccacctgggaagactttaagcagataataaagtgtgaaataacagttatttatagacatggccttcccttggtaacacttaccttgccatctagaaaagaacgttgtcaattcgtagtcaaaccaatgttgtcaacagttggttcattccttcaggacctacaaaatgaagataagggtatcaaaactgcagccatcttcacagcagtttattcacctactgaaggacatctgggatacttccaagttttggcaattatgaatggagttgctataaatacacatgcgcaggcttttgtttgcacggagattcttcaagcaatcactatgtcagcagacacaggtgtttctcttccttcatatgaggaatatcagggatccaaacttattcgaaaagctaaagaggcaccattcgtacccattggaatagcaggttttgcagcagttgttgcatatggattacacaaactgaagagcaggggaaatactaaaatgtccattcatctgatccacatgcgtgtggtagcccaaggctttgttgtaggagcaatgactgttggttctcttaacagtgataatgaacaattacagctctcagaagggtatcaatctgagggacttctcatagcagagcctaattttatatggacttataaacccatggaggaggcacttagccgtgcaggaacaaatggcaagcctttagcccgatctggagcggcaaaggggtgcctcgctggatcaggagcacagtggacaccctgctggatccggaagaatgtaagtcagcagcgagtctgctacggcggcaaaacagcagtggtggacaaaaaaccaagtaatgagcacactgctgagatggaacacatgaaatctttggttcacagactatttacaatcttgcatttagaagagtctcagaaaaagagagagcaccatttactggagaaaattgaccacctgaaggaacagctgcagccccttgaacaggtgaaagctggaatagaagctcattcggaagccaaaaccagtggactcctgtgggctggattggcactgctgtccattcagggtggggcactggcctggctcacgtggtgggtgtactcctgggatatcatggagccagttacatacttcatcacatttgcaaattctatggtcttttttgcatactttatagtcactcgacaggattatacttactcagctgttaagagtaggcaatttcttcagttcttccacaagaaatcaaagcaacagcactttgatgtgcagcaatacaacaagttaaaagaagaccttgctaaggctaaagaatccctgaaacaggcgcgtcattctctctgtttgcaaatgcaagtagaagaactcaatgaaaagaattaatcttacagttttaaatgtcgtcagattttccattatgtattgattttgcaacttaggatgtttttgagtcccatggttcattttgattgtttaatctttgttattaaattcttgtaaaacagaaaaaaaaaaaa

SEQ ID NO: 75 - DNA, 1340 bp, Homo sapiens
  CDS (86)..(1294)
gagccaagacggtcggggctgcttgctaactccaggaacaggtttaagtttttgaaactgaagtaggtctacacagtaggaactcatgtcatttcttaccaatgatgcgagctcagagtcaatagcatccttctctaaacaggaggtcatgagtagctttctgccagagggagggtgttacgagctgctcactgtgataggcaaaggatttgaggacctgatgactgtgaatctagcaaggtacaaaccaacaggagagtacgtgactgtacggaggattaacctagaagcttgttccaatgagatggtaacattcttgcagggcgagctgcatgtctccaaactcttcaaccatcccaatatcgtgccatatcgagccacttttattgcagacaatgagctgtgggttgtcacatcattcatggcatacggttctgcaaaagatctcatctgtacacacttcatggatggcatgaatgagctggcgattgcttacatcctgcagggggtgctgaaggccctcgactacatccaccacatgggatatgtacacaggagtgtcaaagccagccacatcctgatctctgtggatgggaaggtctacctgtctggtttgcgcagcaacctcagcatgataagccatgggcagcggcagcgagtggtccacgattttcccaagtacagtgtcaaggttctgccgtggctcagccccgaggtcctccagcagaatctccagggttatgatgccaagtctgacatctacagtgtgggaatcacagcctgtgaactggccaacggccatgtcccctttaaggatatgcctgccacccagcccaggtcctggttctgtcctccccagatgctgctagagaaactgaacggcacagtgccctgcctgttggataccagcaccatccccgctgaggagctgaccatgagcccttcgcgctcagtggccaactctggcctgagtgacagcctgaccaccagcaccccccggccctccaacggtgactcgccctcccacccctaccaccgaaccttctccccccacttccaccactttgtggagcagtgccttcagcgcaacccggatgccaggcccagtgccagcaccctcctgaaccactctttcttcaagcagatcaagcgacgtgcctcagaggctttgcccgaattgcttcgtcctgtcacccccatcaccaattttgagggcagccagtctcaggaccacagtggaatctttggcctggtaacaaacctggaagagctggaggtggacgattgggagttctgagcctctgcaaactgtgcgcattctccagccagggatgcagagg

SEQ ID NO: 76 - DNA, 4536 bp, Homo sapiens
  CDS (300)..(3173)
aggggacaaaaagagagctagaaaaaatagggggagggggtcatattgattcctgtgggagatgaaattcggatattaaacaactgacctaagtcgcttacagttcttcctcccacctttctattttgcctcttaatcagcccaggcgtcctttccctgagattaaaaaaaagagagaggggagcgttaacaattaaatgtaataagcaactccaaagatggggatgctgtcgaggtggtagttccgtgcaaaccttgctattaccgttgcaaatagacgcggagcccaaggaggtaaaatgcacacttgctgccccccagtaactttggaacaggaccttcacagaaaaatgcatagctggatgctgcagactctagcgtttgctgtaacatctctcgtcctttcgtgtgcagaaaccatcgattattatggggaaatctgtgacaatgcatgtccttgtgaggaaaaggacggcattttaactgtgagctgtgaaaaccgggggatcatcagtctctctgaaattagccctccccgtttcccaatctaccacctcttgttgtccggaaaccttttgaaccgtctctatcccaatgagtttgtcaattacactggggcttcaattttgcatctaggtagcaatgttatccaggacattgagaccggggctttccatgggctacggggtttgaggagattgcatctaaacaataataaactggaacttctgcgagatgataccttccttggcttggagaacctggagtacctacaggtcgattacaactacatcagcgtcattgaacccaatgcttttgggaaactgcatttgttgcaggtgcttatcctcaatgacaatcttttgtccagtttacccaacaatcttttccgttttgtgcccttaacgcacttggacctccgggggaaccggctgaaacttctgccctacgtggggctcttgcagcacatggataaagttgtggagctacagctggaggaaaacccttggaattgttcttgtgagctgatctctctaaaggattggttggacagcatctcctattcagccctggtgggggatgtagtttgtgagacccccttccgcttacacggaagggacttggacgaggtatccaagcaggaactttgcccaaggagacttatttctgactacgagatgaggccgcagacgcctttgagcaccacggggtatttacacaccaccccggcgtcagtgaattctgtggccacttcttcctctgctgtttacaaaccccctttgaagccccctaaggggactcgccaacccaacaagcccagggtgcgccccacctctcggcagccctctaaggacttgggctacagcaactatggccccagcatcgcctatcagaccaaatccccggtgcctttggagtgtcccaccgcgtgctcttgcaacctgcagatctctgatctgggcctcaacgtaaactgccaggagcgaaagatcgagagcatcgctgaactgcagcccaagccctacaatcccaagaaaatgtatctgacagagaactacatcgctgtcgtgcgcaggacagacctcctggaggccacggggctggacctcctgcacctggggaataaccgcatctcgatgatccaggaccgcgctttcggggatctcaccaacctgaggcgcctctacctgaatggcaacaggatcgagaggctgagcccggagttattctatggcctgcagagcctgcagtatctcttcctccagtacaatctcatccgcgagattcagtctggaacttttgacccggtcccaaacctccagctgctattcttgaataacaacctcctgcaggccatgccctcaggcgtcttctctggcttgaccctcctcaggctaaacctgaggagtaaccacttcacctccttgccagtgagtggagttttggaccagctgaagtcactcatccaaatcgacctgcatgacaatccttgggattgtacctgtgacattgtgggcatgaagctgtgggtggagcagctcaaagtgggcgtcctagtggacgaggtgatctgtaaggcgcccaaaaaattcgctgagaccgacatgcgctccattaagtcggagctgctgtgccctgactattcagatgtagtagtttccacgcccacaccctcctctatccaggtccctgcgaggaccagcgccgtgactcctgcggtccggttgaatagcaccggggcccccgcgagcttgggcgcaggcggaggggcgtcgtcggtgcccttgtctgtgttaattctcagcctcctgctggttttcatcatgtccgtcttcgtggccgccgggctcttcgtgctggtcatgaagcgcaggaagaagaaccagagcgaccacaccagcaccaacaactccgacgtgagctcctttaacatgcagtacagcgtgtacggcggcggcggcggcacgggcggccacccacacgcgcacgtgcatcaccgcgggcccgcgctgcccaaggtgaagacgcccgcgggccacgtgtatgaatacatcccccacccactgggccacatgtgcaaaaaccccatctaccgctcccgagagggcaactccgtagaggattacaaagacctgcacgagctcaaggtcacctacagcagcaaccaccacctgcagcagcagcagcagccgccgccgccaccgcagcagccacagcagcagcccccgccgcagctgcagctgcagcctggggaggaggagaggcgggaaagccaccacttgcggagccccgcctacagcgtcagcaccatcgagccccgggaggacctgctgtcgccggtgcaggacgccgaccgcttttacaggggcattttagaaccagacaaacactgctccaccacccccgccggcaatagcctcccggaatatcccaaattcccgtgcagccccgctgcttacactttctcccccaactatgacctgagacgcccccatcagtatttgcacccgggggcaggggacagcaggctacgggaaccggtgctctacagccccccgagtgctgtctttgtagaacccaaccggaacgaatatctggagttaaaagcaaaactaaacgttgagccggactacctcgaagtgctggaaaaacagaccacgtttagccagttctaaaagcaaagaaactctcttggagcttttgcatttaaaacaaacaagcaagcagacacacacagtgaacacatttgattaattgtgttgtttcaacgtttagggtgaagtgccttggcacgggatttctcagcttcggtggaagatacgaaaagggtgtgcaatttcctttaaaatttacacgtgggaaacatttgtgtaaactgggcacatcactttctcttcttgcgtgtggggcaggtgtggagaagggctttaaggaggccaatttgctgcgcgggtgacctgtgaaaggtcacagtcatttttgtagtggttggaagtgctaagaatggtggatgatggcagagcatagattctactcttcctcttttgcttcctccccctcccccgcccctgccccacctctctttctccccttttaagccatgggtgggtctaactggcttttgtggagaaattagcacaccccaactttaataggaaatttgttctctttttccgcccctctccttctctcctcccctcccctcccttctcattccttttctttgtttttaaaggatgtgtttggatgcattctggacatttgaattaaaaaaaaagtattgtgatcctgtaaaggatcaccatagatgtggacaaatcattaaaattacagagctatatgatccataattgattagtcaaaataacttattgatgaaatatacaaatattttattgtagcacctatttttatatgcacatttagcattcctctttccttcactatttagcctatgattttgcagaggtgtcacactgtattaggatctgcatttctaaaactgacgtggtatcaggaaggcattttcaatcattcaaaatgtggagaatttaatggctaaatctttaaaagccaatgcaacccacccaattgaatctgcattttcttttaagaaaacagagctgattgtatcccaatgtattttaaaaaatagggcaattgattgggccattccgagagaattgtttgcaagttttgggttttattagaaaatatttgaaagtatttttattaatgaaccaaaatgacatgttcatttgactactattgtagccgattttcgattgtttaaccaaacccagttgcatttgtacagatccacgtgtactggcacctcagaagaccaaatcatggactgtacaagtctctatacaatgtctttatccctgtgggcagcaagcaatgatgataatgacaaacaggatatctgtaagatggggctactgttgttacagtctcatatgtatcccagcacatgtaattttttaaatagtttctgaataaacacttgataactatgtcaaaaaaaaaaaa

SEQ ID NO: 77 - DNA, 1251 bp, Homo sapiens
  CDS (1)..(1140)
atggttgatgtcgaattctttggcaactttttatgtagttgtaagcagatcagcttcaatgattgttctcaattggttgtcgtcaacttccaatggcaggccactatgctcctcatcttcaagggtctcgtctcctttgcagaacttccagaaccaccactgcactgcccaagaaccctcttgagatgctcttgcagaataagagattatcatcttcaagaacgcaactatggaacctgcacctccgcacatgacgctggtttatggcagataccccgaccattgccataccgcttccttagctcaggctttgttgagtactctgcagataacccaataagacggtattttgtgaccccagccataaggagccttgccctccttgctgccattctcctggtggccctgcaggctcgggcggagccactccaggcaattgctgatgaggctacagcccaggagcagcctggagcagatgatcaggaagtggttgattcctttgcatgggatgaaagagctcctcttcaggtttcagggaagtcctctcctgtttgtgcacggctgctcttgctacaggagacccgggacagaggactgctgtttgccctccctcttcactctgcctaccttgaggatctgctcaggcagagccacttcaggcaagagctgatgaagctgcagcccaggagcagcctggagcagatgatcaggaaatggctcatgcctttacatggcatgaaagtgccgctcttccgctttcagcctgataaaatcattgtcctctccaccctgattcctacaggagactactcaccccataacctcaaaaacctcttcatgaggatggtgaccccagccatgaggaccctcgccatccttgctgccattctcctggtggccctgcaggcccaggctgagccactccaggcaagagctgatgaggttgctgcagccccggagcagattgcagcggacatcccagaagtggttgtttcccttgcatgggacgaaagcttggctccaaagcatccaggctcaaggaaaaacatggactgctattgcagaataccagcgtgcattgcaggagaacgtcgctatggaacctgcatctaccagggaagactctgggcattctgctgctgagcttgcagaaaaagaaaaatgagctcaaaatttgctttgagagctacagggaattgctattactcctgtaccttctgctcaatttcctttcctcatctcaaataaatg

SEQ ID NO: 78 - DNA, 520 bp, Homo sapiens
  CDS (7)..(234)
tacaccatgagcaaagctcaccctcccgagttgaaaaaatttatggacaagaagttatcattgaaattaaatggtggcagacatgtccaaggaatattgcggggatttgatccctttatgaaccttgtgatagatgaatgtgtggagatggcgactagtggacaacagaacaatattggaatggtggtaatacgaggaaatagtatcatcatgttagaagccttggaacgagtataaataatggctgttcagcagagaaacccatgtcctctctccatagggcctgttttactatgatgtaaaaattaggtcatgtacattttcatattagactttttgttaaataaacttttgtaatagtcaaaaatgctttttcagatgttttgaatatagaaaatcagctctcattccagttttttttaacatgaattttcctggttgacattgatttcaaagggttttatgcattaaagtgaaagaattttattaaatgtgaaacatggcaaggaaaaaaaaaaaa

SEQ ID NO: 79 - DNA, 2083 bp, Homo sapiens
  CDS (82)..(1818)
aattcccgggtcgacgatttcgtgcggccgggagcccgccgcgctggtagcgatattaataaggcagcggaaagaagaaatatgaatacggctccatcaagacccagccccacacgaagggatccatatggctttggagacagtcgagattcaaggcgtgatcgatccccaattcgaggaagtccaaggagagagcccagggatggcagaaatggccgggatgcccgggacagcagagacattcgagacccccgagacttgcgggaccacagacatagtagagatttgcgggatcacagagacagcaggagtgtgcgcgacgttcgggacgtgagggatcttagagactttcgtgatctaagagactctagggattttcgagatcagcgagaccccatgtacgacagatacagagacatgagagactcccgagatcctatgtacaggagagaaggctcttatgaccgatacctacgaatggatgactattgcaggagaaaggatgactcttattttgaccgttacagagatagctttgatggacggggccctccaggcccagaaagtcagtctcgtgcaaaagagcgtttgaaacgtgaggaacggcgtagagaagagctttatcgtcaatattttgaggaaatccagagacgctttgatgccgaaaggcccgttgattgttctgtgattgtggtcaacaaacagacaaaagactatgctgagtctgtggggcggaaggtgcgagacctgggcatggtagtggacttgatcttccttaacacagaagtgtcactgtcacaagccttggaggatgttagcaggggaggttctccttttgctattgtcatcacccagcaacaccagattcaccgctcctgcacagtcaacatcatgtttggaaccccgcaagagcatcgcaacatgccccaagcagatgccatggtgctggtggccagaaattatgagcgttacaagaatgagtgccgggagaaggaacgtgaggagattgccagacaggcagccaagatggccgatgaagccatcctgcaggaaagagagagaggaggccctgaggagggagtgcgtgggggccaccctccagccatccagagcctcatcaacctgctggcagacaacaggtacctcactgctgaagagactgacaagatcatcaactacctgcgagagcggaaggagcggctgatgaggagcagcaccgactctctgcctggcccgatttcccgccaaccactcggggcgacctcgggtgcctcgctgaagacacagccaagctcccaaccgctccagagcggccaagtgctcccctctgctacacccactccatctgcaccccccacctcccagcaagagcttcaggccaaaatcctcagcctcttcaatagtggcacagtgacggccaatagcagctctgcatccccctcggttgctgccggaaacaccccaaaccagaatttttccacagcagcaaacagccagcctcaacaaagatcacaggcttctggcaatcagcctccaagcattttgggacagggaggatctgctcagaacatgggccccagacctggggctccttcccaagggctttttggccagccttccagtcgcctggcacctgctagcaacatgactagccagaggcctgtgtcttccacaggtatcaactttgacaatccaagtgtacagaaggctctggataccctgatccagagtggccctgctctctcccacctggttagccagaccacagcacagatggggcagccacaggcccccatgggatcttaccagaggcattactgaagctaaatctttcaactctccccagtcccctcatcccctggcctcctcccacttacttgttctaaatagagctgtttggaggatgttctctgcgctcccaggccggcatcgagtgtcatcaatttctaccacctgctctctcttctgcccaaggctgtgttgcttattccttacaaagtttatactgcatttggggctgtatctttttttgttttttgttttgtagaaaataaatatctccgggggcagtaaaaaaaaaaaa

SEQ ID NO: 80 - DNA, 438 bp, Homo sapiens
  CDS (186)..(338)
ccctgttcttctttacctaactctatagcagtaattggtacatttcttccatcaaagtttcatatttttagcaaagtatcaagccttaccgtacggaaagctgcaaccacaagattggagggaaacaggtttctgttggaaaagaaagcattctgtcagtattcttttaaaacaattttttagagatgaggtccctgttgcccaggctggagtgcagtggtgtgattgcagctcactgcagccttgaacttttgggctcaagtgatcctcctgcctcagcctcccaaagtgttgggactacaggcgtgagccatggtacctgtcttcatcagtattcttaaaattcagtgtgcaaagtatctgctttgagatgtccacttctaaaaccctaacacagtgttctctctccacccctagctgacactgcaccttttgctt

SEQ ID NO: 81 - DNA, 2693 bp, Homo sapiens
  CDS (79)..(2334)
gacagatctgcgcgtatcctggagccggcccagttgtgaactaggagagctttgggacctctgtcccaagcaagagagatgaatggagagtatagaggcagaggatttggacgaggaagatttcaaagctggaaaaggggaagaggtggtgggaacttctcaggaaaatggagagaaagagaacacagacctgatctgagtaaaaccacaggaaaacgtacttctggggacttaatacaagaaattggatacaaaaatggaagactgaaagagcagaaaggaaatattgaggtaactccccagaaagtagtaattcaggaagcagcaaccatccttatggctaagagactaaaagaagttctgaggttaccagaatgtgggaattcaaaggatgaaatagaaagaaagggaagtattttggtagattttaaagaactgacagaaggtggtgaagtaactaacttgataccagatatagcaactgaactaagagatgcacctgagaaaaccttggcttgcatgggtttggcaatacatcaggtgttaactaaggaccttgaaaggcatgcagctgagttacaagcccaggaaggattgtctaatgatggagaaacaatggtaaatgtgccacatattcatgcaagggtgtacaactatgagcctttgacacagctcaagaatgtcagagcaaattactatggaaaatacattgctctaagagggacagtggttcgtgtcagtaatataaagcctctttgcaccaagatggcttttctttgtgctgcatgtggagaaattcagagctttcctcttccagatggaaaatacagtcttcccacaaagtgtcctgtgcctgtgtgtcgaggcaggtcatttactgctctccgcagctctcctctcacagttacgatggactggcagtcaatcaaaatccaggaattgatgtctgatgatcagagagaagcaggtcggattccacgaacaatagaatgtgagcttgttcatgatcttgtggatagctgtgtcccgggagacacagtgactattactggaattgtcaaagtctcaaatgcggaagaaggtttggcattagcactctttggaggaagccagaaatacgcagatgacaaaaacagaattccaattcggggagacccccacatccttgttgttggagatccaggcctaggaaaaagtcaaatgctacaggcagcgtgcaatgttgccccacgtggcgtgtatgtttgtggtaacaccacgaccacctctggtctgacggtaactctttcaaaagatagttcctctggagattttgctttggaagctggtgccctggtacttggtgatcaaggtatttgtggaatcgatgaatttgataagatggggaatcaacatcaagccttgttggaagccatggagcagcaaagtattagtcttgctaaggctggtgtggtttgtagccttcctgcaagaacttccattattgctgctgcaaatccagttggaggacattacaataaagccaaaacagtttctgagaatttaaaaatggggagtgcactactatccagatttgatttggtctttatcctgttagatactccaaatgagcatcatgatcacttactctctgaacatgtgattgcaataagagctggaaagcagagaaccattagcagtgccacagtagctcgtatgaatagtcaagattcaaatacttccgtacttgaagtagtttctgagaagccattatcagaaagactaaaggtggttcctggagaaacaatagatcccattccccaccagctattgagaaagtacattggctatgctcggcagtatgtgtacccaaggctatccacagaagctgctcgagttcttcaagatttttaccttgagctccggaaacagagccagaggttaaatagctcaccaatcactaccaggcagctggaatctttgattcgtctgacagaggcacgagcaaggttggaattgagagaggaagcaaccaaagaagacgctgaggatatagtggaaattatgaaatatagcatgctaggaacttactctgatgaatttgggaacctagattttgagcgatcccagcatggttctggaatgagcaacaggtcaacagcgaaaagatttatttctgctctcaacaacgttgctgaaagaacttataataatatatttcaatttcatcaacttcggcagattgccaaagaactaaacattcaggttgctgattttgaaaattttattggatcactaaatgaccagggttacctcttgaaaaaaggcccaaaagtttaccagcttcaaactatgtaaaaggacttcaccaagttagggcctcctgggtttattgcagattaaagccatctcagtgaagatatgcgtgcacgcacagacagacagacacacacacacacacacacacacacacacacacacacacacacagtcaaatactgttctctgaaaaatgatgtcccaaaagtattataataggaaaaaagcattaaatataataaactaatttaagaagtgataaagtctccagatgcagtagctcacactgtaatcacagtgactcaggaggctgaggtgagaggattccttgaggccagggttcgagaccaaccttgggcaacatagcaagaccccatttcttaaaaaaaaaaaaa

SEQ ID NO: 82 - DNA, 1141 bp, Homo sapiens
  CDS (556)..(864)
taagcttgcggccgcccttttgagtacctctgtccaggactgaagacgaaccttggccgcagtccttgcgaactgttcgcaaaacagtgcgggctgcggtgggtcagcgtcacatgctaatgacaggatgttcctcgtagctttttattttgtgcgtcttatgtttgtatagtgtgttgtcattttgatttttttttttttttaagtataaaagctgcttagaatagttctatcatgaagggcacttttcagattgtgggctggaaagggttattttatctgtgggggagggagggagacgtgaagcctatttaaaatgagcctgtgacgattatgcacatgaccagaggcggccggtaatcagggcagagtctggtgtggaccgccgggcgcagagcggctccgcggcgggagctgagcggaaggcgcgggctgcgatctgctctctgttcccctggatccgcctatgcacattacccttgtttcattactttttcatgtcatttttttatcccaaaaaatattttttaaaagttaaaaaaagacatatcaaacatgcaaatacttgaatccagcaggccaatagtgaaatgtgaacactttctaattctacacttccaggttgacatcagtacacagaaacaggctctaggaaaaatttctaagttcatagcctacgtgtgtgtatgtgtgcgtgttgaaacagaagtgtgtgtgtgtgtgcatgtgtggcgcgtgctcctgcacggcgtgcagttttctgtgtttgtgtgtttgaaagcgtgtgaggatttaactgtgggttttcccttgtattcagtatacgctttttttttggcgcattggtcaaacggttgttattattagcttctaactttgcactgagtgtcctcgcccttcctttagctaatcctatacattacagagaattcctaggacagggctggcgacaattcatgtgtaaatgtttactcaaggactctgtgactgcgtttaaaaagtacagtgtatatctctggagaaataacatgtatacctacctttagcagctttttattgtggactaatgcaagaaaattattaccagagtattgcaccatttttccatttggaatataaagttaaagagaaaaaaaaaaaa

SEQ ID NO: 83 - DNA, 2197 bp, Homo sapiens
  CDS (1263)..(1979)
acctggcatggttttaagtgatattaagagtattggcttatatttaagaagtcaaaagataccactttatgaggaatgccagcttttggtgagaaaaggatttgattttcagagaaaacagtatggcaaactaaagaagtttactactgtaaatcctgagttttataatgaaccaaaaaccaaactttatcttaagctaagtcggaaggaaagatcttcagcttatagcaaaaatgatctttgggtggtttcaaaaaccctagactttgagctggatacttttatcgcatgtagtgctttctttggaccatcatctatcaatgagatagaaatactgcctttgaaaggctatttcccttctaattggcccactaacatggttgtccatgcgttattggtttgtaatgctagcacagaactgactactttgaaaaacattcaggactactttaatccagctactctacctctaacacagtacctgttaacaacgtcttcgccaactatagttagtaacaaaagagtcagtaagagaaaatttatcccaccagccttcacaaatgtcagtacaaaatttgaactactcagcctaggagcaacattgaagttagctagtgagttgattcaggtacacaagttaaacaaggatcaagctacagctctaattcaaatagctcaaatgatggcatcacatgaaagcattgaagaagtgaaggaactgcaaactcataccttccctatcacaatcatacatggtgtgtttggagcaggaaagagttacttgctggcagtggtgattttgttctttgtacagctgtttgaaaagagtgaagctcccaccattggaaatgcaaggccgtggaaacttctgatttcttcttctactaatgtggctgttgacagagtacttcttgggcttctcagtcttggatttgaaaactttatcagagttgggagtgttaggaagattgccaaaccaattttaccttatagcttgcatgctggctcaaaaaatgaaagtgaacagttaaaagaactacatgcactaatgaaagaagacctgactcctacggaaagagtctatgtgagaaaaagcattgagcagcataaactggggaccaatagaaccctgctgaagcaggttcgagtgtgaaaagctgattcttgttggggatcccaaacagctacctcctactattcagggttctgatgcagctcatgaaaatggattggaacaaactctttttgatcgactttgcttaatgggtcacaagccaattctattgagaactcaataccgttgtcatcctgcaatcagtgctattgctaatgatctgttttacaaaggagccctcatgaatggtgtaacagaaatagagcggagccctttattggaatggctaccaaccctgtgtttttataatgttaaaggactagaacagatagaaagagataacagctttcataatgtggcagaagctacgtttacactcaagctgattcaatcactgattgcaagtggaatagcaggctctatgattggtgtgataacattatacaaatcccagatgtacaagctttgtcatttactcagtgctgtggactttcaccatcctgatattaaaactgtgcaggtgtccacagtagatgcttttcagggagctgaaaaggagatcattattctgtcctgtgtaaggacaagacaagtaggattcattgattcagaaaaaagaatgaatgttgcattgactagaggaaagaggcatttgttgattgtgggaaatttagcctgtttgaggaaaaatcaactttggggacgagtgatccaacactgcgaaggaagggaagatggattgcaacatgcaaaccagtatgaaccacagctgaaccatctccttaaagattattttgaaaaacaagtggaagaaaaacagaagaaaaagagtgaaaaagagaaatctaaagataaatctcattcataaaaagacatggtgtaaatattttgtatttatgtaaattcagactcattttacatgatatattttttatatttttattactctaaaccctcttattaaaaatatgatatttaaataacatagtaaacacatgtaaaaattttgttcttcaaaaaagtgtacaaaaggtagtataaaatcctactaataaaaataagcttttttctaaaaaaaaaaaa

SEQ ID NO: 84 - DNA, 796 bp, Homo sapiens
  CDS (242)..(739)
gattagcgccaacagctcagagaaaacgtgacgaaaaccagtctgtaaaacccgagcctgggagaggggcttcggtgcgcggggggaatttgcagacgctccctgctggcggagatttcctgacctgtccttcggcgcgggactttcggcgggtcccggccgggcagacccaagtgccggcggcggagactgcagtggagccagtaccggctgtagtggccggggccgtggcgggagagtcatgtcagagccgcagccgcggggcgcagagcgcgatctctaccgggacacgtgggtgcgatacctgggctatgccaatgaggtgggcgaggctttccgctctcttgtgccagcggcggtggtgtggctgagctatggcgtggccagctcctacgtgctggcggatgccattgacaaaggcaagaaggctggagaggtgcccagccctgaagcaggccgcagcgccagggtgaccgtggctgtggtggacacctttgtatggcaggctctagcctctgtggccattccgggcttcaccatcaaccgcgtgtgtgctgcctctctctatgtcctgggcactgccacccgctggcccctggctgtccgcaagtggaccaccaccgcgcttgggctgttgaccatccccatcattatccaccccattgacaggtcggtggatttcctcctggactccagcctgcgcaagctctacccaacagtggggaagcccagctcctcctgatcatactctggtacctggcctgtgcatcggcctcctgcttcatgtcaacctcct

SEQ ID NO: 85 - DNA, 1872 bp, Homo sapiens
  CDS (44)..(1063)
acgcgtccgggaacttggagcagccagaagaagtcagtattacatgaaatatgggaatccaaattatggaggcatgaaaggaattcttagcaattcatggaagcgaagatatcattcccgtcgtattcagcgggacgtgatcaagaagagagccctgattggggatgacgttggcttgacgtcgtataaacatcgacattctgggctagtgaatgttcccgaggaacccattgaagaggaggaagaggaggaggaggaggaagaggaagaggaagaagaagaccaggacatggatgcagatgacagagtggtggtagagtaccacgaggagctcccggctctcaagcagccccgggagcggagcgcgtctagacgatccagtgccagcagctcagactcagatgaaatggactatgatctagaactgaaaatgatttccacgccttcaccaaagaaaagcatgaaaatgactatgtatgctgacgaagtggaatctcagttgaaaaatattaggaactccatgagggcagatagtgtatcttcaagcaatatcaaaaaccgaattggtaacaaattaccacctgagaaatttgcagatgtccgacatctattagatgagaaacgtcagcactcccgtccacggccaccagtcagcagtactaaatcagatatacgccagcggttaggaaaaagaccacattctccggaaaaggcttttagtagtaaccccgtcgttcggagagagccctcttctgatgtgcatagtaggctaggtgttcccaggcaggatagtaaaggcctctacgccgatactcgggagaagaaatcaggtaatttatggactcgcctaggatctgcacccaagaccaaagaaaagaatacgaagaaagtggatcacagggcgcctggcgctgaggaagacgactctgagctgcaaagggcatggggggctctgattaaggagaaagagcagtctcgccaaaagaagagccggttagataacttaccatctctccagattgaagttagtcgggaaagcagctctggttcagaggcagagtcctgatgcccctggggcctatggcagctgccctaaagcctgacattcttgcacagggtggggcgcgcagtaggaacctcccccgcaggagctggcgccctctcgctcctgctcacacagtcaccctccgctcttgctacttcggcaagacatcttaagaatgtgacacattttcaagggcatctctatctttcgctgcagagttgtagttctgggccctcgattcctttcccaccaccccacaggctttaccctttgagaaaaaggcagccctccagattttgtagacatttttcttaatatttttaacattgtgtcttttaaaagaaatgttttacacagttcatccaaagagcagagaactgaacttctcactattgccttggccctgacagctgttaccagcacccttttcccaagaaaagtcaattcccaggtgcttattggacatccttcgagggggaagaggagggaagcggccagctcacccttccgggaccctagtgtggggcgaatctcacggacctgacctcagaggtgcaccagtgccgcccaggtagataagagctgcagcattgactgtgcttccgttcttccctcggggattgctcatggcatgggcctcttacgtgctgtcagcttgatgtgaagatcaagttcagtgctgtgggatttttaggaacaaaaaactgtgacgtctggatttggggttgatttttgtgctggggtgggattatgggtcaatgttgaagaatttttaagtctgtattatgtttaaaacatgaatgatttgaaagtttaaaaaaaaaaaa

SEQ ID NO: 86 - DNA, 1819 bp, Homo sapiens
  CDS (984)..(1406)
gcacgagcccttcctcaccccgtcccctgagtcccctgaccagtggtccagctcgtccccgcattccaacgtctccgactggtccgagggcgtctccagccctcccaccagcatgcagtcccagatcgcccgcattccggaggccttcaagtaaacggcgcgccccacgagaccccggcttcctttcccaagccttcgggcgtctgtgtgcgctctgtggatgccagggccgaccagaggagcctttttaaaacacatgtttttatacaaaataagaacaaggattttaattttttttagtatttatttatgtacttttattttacacagaaacactgcctttttatttatatgtactgttttatctggccccaggtagaaacttttatctattctgagaaaacaagcaagttctgagagccagggttttcctacgtaggatgaaaagattcttctgtgtttataaaatataaacaaagattcatgatttataaatgccatttatttattgattccttttttcaaaatccaaaaagaaatgatgttggagaagggaagttgaacgagcatagtccaaaaagctcctggggcgtccaggccgcgccctttccccgacgcccacccaaccccaagccagcccggccgctccaccagcatcacctgcctgttaggagaagctgcatccagaggcaaacggaggcaaagctggctcaccttccgcacgcggattaatttgcatctgaaataggaaacaagtgaaagcatatgggttagatgttgccatgtgttttagatggtttcttgcaagcatgcttgtgaaaatgtgttctcggagtgtgtatgccaagagtgcacccatggtaccaatcatgaatctttgtttcaggttcagtattatgtagttgttcgttggttatacaagttcttggtccctccagaaccaccccggccccctgcccgttcttgaaatgtaggcatcatgcatgtcaaacatgagatgtgtggactgtggcacttgcctgggtcacacacggaggcatcctacccttttctggggaaagacactgcctgggctgaccccggtggcggccccagcacctcagcctgcacagtgtcccccaggttccgaagaagatgctccagcaacacagcctgggccccagctcgcgggacccgaccccccgtgggctcccgtgttttgtaggagacttgccagagccgggcacattgagctgtgcaacgccgtgggctgcgtcctttggtcctgtccccgcagccctggcagggggcatgcggtcgggcaggggctggagggaggcgggggctgcccttgggccacccctcctagtttgggaggagcagatttttgcaataccaagtatagcctatggcagaaaaaatgtctgtaaatatgtttttaaaggtggattttgtttaaaaaatcttaatgaatgagtctgttgtgtgtcatgccagtgagggacgtcagacttggctcagctcggggagccttagccgcccatgcactggggacgctccgctgccgtgccgcctgcactcctcagggcagcctcccccggctctacgggggccgcgtggtgccatccccagggggcatgaccagatgcgtcccaagatgttgatttttactgtgttttataaaatagagtgtagtttacagaaaaagactttaaaagtgatctacatgaggaactgtagatgatgtatttttttcatcttttttgttaactgatttgcaataaaaatgatactgatggtgaaaaaaaaaaaaaaaaaaacctatgcggccgcaagctta

SEQ ID NO: 87 - DNA, 4070 bp, Homo sapiens
  CDS (12)..(1997)
tgagtgatgctatggaggagatcgacatgcaacaaggcacctcgtcagtaaaaccacaggctaatggtgttttggatgaaaaatctcaaattcaggagccatgttgttcagacctcttcctgtttcctgacgagagtgggaatgtatcccaggagtccggccccacctatgcctcattctctcaccatttcatcagtgatgcaatgacaggtgtgcccactgagaatgatgacttttgcattctttttgcaccaaaagcagccatgcaggagaaggaagaagaaccagttataaaaatcatggttgatgatgcaattgtgataagagacaattatttcagtctgcccgttaataagaccgatacgagcaaagcccccttacactttcccattcctgtgattcgctatgtggtgaaggaggtctctcttgtctggcatctttatggaggaaaggattttggaacagtccctcccacttctccggctaaaagttatattagtccccacagttcgccttctcacacacccacgagacatggacgtaatacagtatgtgggggaaaaggaaggaaccatgactttttaatggaaatacagctaagcaaggtgaagtttcagcatgaagtctacccgccatgcaaacctgattgtgattccagcctctcagaacacccagtctcccggcaggtgttcattgttcaggatcttgagattcgagatcgtttggcaacatcacaaatgaataaatttttatacctgtattgcagtaaagaaatgcctcgaaaagctcactccaacatgttgacagtgaaagccttacacgtgtgtccagaatctggcaggtccccacaggagtgctgcttgagagtgtcgctgatgccgctccgcctcaatattgaccaggatgctttgttcttcctgaaggatttcttcacaagtctttctgcagaagtagagcttcaaatgactccagatccagaagttaaaaagtctcctggagctgatgtcacctgcagtttgccaaggcatttgagtacctcaaaggagccaaatctggttatttctttctctgggccaaaacagccttcccaaaatgatagtgccaattcagtggaagtggttaatggcatggaagagaagaacttctctgctgaagaagcatcttttagggatcagcctgtgttttttagagaatttagattcacgtcagaagttcccattcgacttgattatcatggcaaacatgtatcaatggatcagggtacgctagctgggattttgattggtctggctcagttaaactgctctgaactaaagctcaagaggctttcctatcgacatggtttactaggcgttgacaaattattctcatatgcaatcactgagtggcttaatgacattaagaagaaccagctaccaggaatcctgggaggtgttggacctatgcattcactagtacaattagtacaaggcctaaaggacttggtctggctcccaatagagcagtaccggaaggatggccgcattgtcagagggtttcagagaggcgctgcttcctttggtacctcgacagcgatggctgctctagaactcacaaacagaatggttcaaaccatacaggcagctgcagagactgcttatgatatggtgtctcctggtaccctttctatcgagcccaagaagaccaaaaggtttcctcatcaccggttagcccaccagccagtagacctgagggaaggtgtggccaaggcctacagtgttgtgaaagagggaatcacagacacggctcagaccatttatgaaactgcggctcgagaacacgagagcagaggggtgactggtgccgtgggcgaggttctgcgccagattcctccggcagtggtgaaacctctgattgttgccacagaagcaacgtcaaacgtgctgggtggcatgagaaaccaaattaggccagatgtccggcaagacgagtcacagaaatggcgccacggggatgactgatggcttggaactgacagtgtgaagataaggagagtggaaccaggagctcagagtcctgacagcagcttcagaggaagctcgtttaattttattgtgctcatctcaggaacaaaagcattttttagttaaataatttaacatcaaaacaacatgcaaccaaaaacttctgacatttatagttgatacttgcctatagaaatgtttggtggctggtgtcaaaggtccttaaagcatttgctgccaagttagtggaaggctcacttttgttaagatgactgtaattctccttgttaccgacgagagatcattggaagctgccttctaacactttgtgtagctctgtggagttggattttcttaaggtttaaaaagaatcacagcttcggaacttttaactgaaaatgagagacagaagccacaggggaagcaaagcaaataggattttcaatataaatatcagtgtggaaaaataacctattctgttgaatttagtgttcatgcacttgagaacaacattatttccatttactccgaaaatccttctgtgggggtttgagaaagtgaatgttgcagacatgttctgttgtgttgcactttatcctgtgtttatgtgtatgtgtttttagattaattcaagttgtgtgctatatttcttgtataatttacaaagttacacaaaatataaagagcagtaaacttgtctgaaagtttttggcaaaggaaggtaacttcaatgtaatagcttcctttaagagtacaggaaaatgcattctgtaatgaagtggggcccatgtaattgtttatattttcagttttaagcaggtatagtgcaggcttgttaggaatgtgtggaagggaagattggaagtgatttttcctcttttaaaagtaaacaaaattcttcaaatatgccctagttaactatttcagcataccatttttacttggttaacagtgtacattttgataacctatcaggaatgaataaagtatttttatttaaaggtgatattgttttatgcttccatgaatattttgcttttcttagagcatattcatagatgcagtactgtgatttaccgcaagataattgggaacactttctcaaaatcgattttggttaatatcaggtaaatcattacctaggagtaagagggaaattgttgtcaattcctgactttagattgatccagcagaaagaaaaggtggaactttgtatatatccactgttgaaagttgcatgacctgacttcctgttttctaaagttgggggaatattattgaacttcaatttcagaactgcatttcaatttggggcttggaaaatgtagttaaatcaatttcgttctctaaattttctaagcaggaaagcaatgtaaaccaaaaatcaaaatgtttagaatttataaaaatggggttatatagcttttaattttagtttcctttttactgccaaaaaacttaaaaagacaacagcgtaaccacctgtttaagcaccgtgggaccatctcttattcgggtagagcctggtcctggcgacacactaacaggaaggcgtgctgtgttaccgggaaggcgcctctggctgtggggtgcgttctgaccaccccgctcagatgccagcattttccatttgcccttaaggaaacttgctatgtgtgttaacccagttatgattagtcaaactggaaaacacttgatcaaacttaaaattgtaaaatctgtctaacttttaaatatactttccacagttgtacttaagttcaattaactacagtatagagaaaaataattattctcttctttgcacccggagttgcaaacaaattaagtttacaaatctcatttaaacatatatctttgtaatgtaatctccgcggttctttctttgttctaccctcctgcacctgttgtcgatgtaatcattttgggaacagaaacgttgtgtctcaaaaagattcgttgtcagttcagccaagatgttctttacctgagattctggaaagatgtttatctatatcggaacacttctacattattaaatgtccttaagctttaaaaaaaaaaaaa

SEQ ID NO: 88 - DNA, 2734 bp, Homo sapiens
  CDS (576)..(1919)
cgtctcaccccagctcctttggctccgcaccccacccacacctgctgcccaccaccccggcagcacctttccctgcccaggcttcagagtgccctgttgctgctgccactgccccccacactccagggccatgtcagagctcccatctaccctccaccagcatgccgctcctgaagatgcccccaccattctcggggtgcagccacccctgcagcgggcactgtggtgggcactgcagtgggcctctcctcccacccccgagctctcagccactccctagcactcacagggatcccgggtgcaaggggcacaagtttgcacacagtggcctggcttgccagctgccccagccctgcgaggcagatgaggggctgggtgaggaagaggatagcagctctgagcgaagctcctgcacctcatcctccacccaccagagagatgggaagttctgtgactgctgctactgtgagttcttcggccacaatgcgccacccgctgccccgacgagtcggaactataccgagatccgggagaagctccgctcgaggctgaccaggcggaaagaggagctgcccatgaaggggggcaccctgggcgggatccctggggagcccgccgtggaccaccgagatgtggatgagctgctggaattcatcaacagcacggagcccaaagtccccaacagcgccagggccgccaagcgggcccggcacaagctgaaaaagaaggaaaaggagaaggcccagttggcagcagaagctctaaagcaggcaaatcgtgtttctggaagccgggagccaaggcctgccagggagaggctcttggagtggcccgaccgggaactggatcgggtcaacagcttcctgagcagccgtctgcaggagatcaaaaacactgtcaaagactccatccgtgccagcttcagtgtgtgtgagctcagcatggacagcaatggcttctctaaggagggggctgctgagcctgagcctcagagtctacccccctcaaacctcagtggctcctcagagcagcagcctgacatcaaccttgacctgtcccctttgactttgggctcccctcagaaccacacgttacaagctccaggcgagccagccccaccatgggcagaaatgagaggcccccacccaccatggacagaggtgagggggccccctcccggtatcgtccccgagaacgggctcgtgaggagactcaacaccgtgcccaacctatcccgggtgatctgggtcaagacacccaagccgggctaccccagctccgaggagccaagctcaaaggaagttcccagttgcaagcaggagctgcctgagcctgtgtcctcaggtgggaagccacagaagggcaagaggcagggcagtcaggccaagaagagcgaggcaagcccagccccccggcccccagccagcctagaggttcccagtgccaagggccaggtcgctggccccaagcagccaggcagggtcctagagcttcccaaagtaggcagctgtgctgaggctggagaggggagccgggggagccggccaggaccaggttgggctggcagtcccaaaactgagaaggagaagggcagctcctggcgaaactggccaggcgaggccaaggcacggcctcaggagcaggagtctgtgcagcccccaggcccagcaaggccacagagcttgccccagggcaagggccgcagccgccggagccgcaacaagcaggagaagccagcctcctccttggacgatgtgttcctgcccaaggacatggacggggtggagatggatgagactgaccgagaggtggagtactttaagaggttctgtttggattctgcaaagcagactcgtcagaaagttgctgtgaactggaccaacttcagcctcaagaaaaccactcctagcacagctcagtgaggccctgcccaggctgagctgcttcagggcatcctgaggccctgactgccagctgaaggcgtataatttttccctccgtgtgccccacctacccgtccaaaactgagaaggagaagggcagctcctggcgaaactggccaggcgaggccaaggcacggcctcaggagcaggagtctgtgcagcccccaggcccagcaaggccacagagcttgccccagggccagggccgcagccgccggagccgcaacaagcaggagaagccagcctcctccttggacgatgtgttcctgcccaaggacatggacggggtggagatggatgagactgaccgagaggcagggcagtcaggccaagaagagctggcccaacactgctctctttgtgtttggtttttttgtttttgtttttattttgtttttttccaattctttacttttgatactgtgaagatctttcgtgccgaaagataaagcaacatttggacacagagttggcatgttggtgatttgtgggtctgggcggggagggagttgagggtgtgctcagaagcatgggctctcccttagtcactaaccctagcatgcaccatgcatcagcagtttggtgctattgtcccattttacaggtgaggaaactaaagccgataggaaagtgactcagctcaacttagtctggctgattagcattgagcgcagactggtatgattatggcatctgtgcccttttctccttttgggaggtctctggtatgtgagcctggggcagccccttccccactctttcctgtttccctctttgcaagatgggtgagt

SEQ ID NO: 89 - DNA, 3813 bp, Homo sapiens
  CDS (183)..(2492)
agagtaaagtgcagcctctccagacactggggccccagtggctgtgggcgaaggtaatccaggcctgggtacgattccgggccctccttcgacttcccagcggttgctggtaggaggagttggcggaacgacttggaactcctttataagtgtcagctgtgagattttaatttgatttgaaaatgagtaagtgcagaaagacaccagttcagcagctagcaagtcccgcgtcattcagcccagatattcttgctgacatttttgaactctttgccaagaacttttcttatggcaagccacttaataatgagtggcagttaccagatcccagtgagattttcacctgtgaccacactgaatttaatgcatttcttgatttgaagaactccctaaatgaagtaaaaaacctactgagtgataagaaactggatgagtggcatgagcacactgctttcactaataaagcagggaaaatcatttctcatgttagaaaatctgtgaatgctgaactttgtactcaagcatggtgtaagttccatgagattttgtgcagctttccacttattccacaggaagcttttcagaatggaaaactgaattctctacacctttgtgaagctccaggagcttttatagctagtctcaaccactacttaaaatcccatcggtttccttgtcattggagttgggtagcgaatactctgaatccataccatgaagcaaatgacgacctcatgatgattatggatgaccggcttattgcaaataccttgcactggtggtactttggtccagataacactggtgatatcatgaccctgaaattcttgactggacttcagaatttcataagcagcatggctactgttcacttggtcactgcagatgggagttttgattgccaaggaaacccaggtgaacaagaagctttagtttcttctttgcattactgtgaagttgtcactgctctgaccactcttggaaacggtggctcttttgttctaaagatgtttactatgtttgaacattgttccataaacttgatgtacctgctaaactgttgttttgaccaagtccatgttttcaaacctgctactagcaaggcaggaaactccgaagtctatgtggtttgcctccactataaggggagagaggccatccatcctctgttatctaagatgaccttgaattttgggactgaaatgaaaaggaaagccctttttccccatcatgtgattcctgattcttttcttaagagacatgaagaatgttgtgtgttctttcataaatatcagctagagactatttctgaaaacattcgtctatttgagtgcatgggaaaggcggaacaagaaaagctgaataatttaagggattgtgctatacaatattttatgcaaaaatttcaactgaaacatctttccagaaataattggctagtaaaaaaatctagtattggttgtagtacaaatacaaaatggtttgggcagaggaacaaatattttaaaacttataatgaaaggaagatgctagaagccctttcatggaaagataaagtagccaaaggatactttaatagttgggctgaagaacatggtgtatatcatcctgggcagagttctattttagaaggaacagcttccaatcttgagtgtcacttatggcatattttggagggaaagaaactgccaaaggtaaaatgttctcctttttgcaatggtgaaattttaaaaactcttaatgaagcaattgaaaagtcattaggaggagcttttaatttggattccaagtttaggccaaaacagcagtattcttgttcttgtcatgttttttctgaagaactgatattttccgagttgtgtagccttactgagtgccttcaggatgagcaggttgtagtacccagcaatcaaataaagtgcctgctggtgggcttttcgactctccgtaatatcaaaatgcatataccgttggaagttcgactcctagaatcagctgaactcacaacttttagctgttcattgcttcatgatggagatccaacttaccagcgtttatttttggactgccttctacattcattgcgggagcttcatacaggagatgttatgattttgcctgtactttcttgcttcacaagatttatggctggtttgatctttgtactccacagttgttttagattcatcacttttgtttgtcccacatcctctgatcccctgaggacctgcgcagtcctgctatgtgttggttatcaggaccttccaaatccagttttccgatatttgcagagtgtgaatgaattgttgagcactttgctcaactctgactcaccccagcaggttttacagtttgtgccaatggaggtactccttaagggggccctgcttgattttttgtgggatttgaatgctgccattgctaaaaggcatttgcatttcattattcaaagagagagagaagaaattatcaacagccttcagttacaaaactgaacatatgctttctgagattcaactttatgatttcttataatttgcccagtatttgcatcctgttgctctattaatttaaaaaccttttattttggggaaaggccaacatttgcatcattcaaagtctcattaattctggaaaaccatccattctgatctctagggtatatacacccacaggcatagagctcttccacgtggtggaatctatgcaatgatagatattcacactctaaatatgaggtgtgtgtatgtgtatgggtggccacagccatgcttacctatgccatttagttggtcttacttaatctgcttaagatttgcatctgtgtacctttgttcagattagttttttttttttccagccgatttcctcttagtggctaatgctgttagtgaattttccaactaatttcctctcattggttaatgttgttaatgaattgagagaggtaattgaggaaaggaaatgagtaaatcactgttcagcaacactgatttccgttaacacatcagttatgaatttcagggaattcatctcgccagattcttgataacatgccattcattgcccttaggtgattgaccctattttcttacatggctcaaataaaactagtatgctgttgtatgaatcttttactgaccacaccatccaactataaaaatataacgggacagctttaaaccaaagatcatgtttagaacaatgaaaaattatttgttgtatctaatacacgcctgtattgtgaaaagcttcatttagcaatgatgtaataatttttaacttccaggaaataatctgtgaatggaaagattttttaagattttgagatagtgtttagtctcatgttgggaacacatgaatgtgatgaacatagtgaatactaaagaaaacgcttcagactttcagaatgatggttcagaatttaaaatttttaatcttttctaatttctttttttcagtgtgaaaatagcactttaccaaaagattagccatgaaatggttattttgccagttacatttgatttcttttgtatctgcaatgtaatgagttattttatttcttctgtatttgcagtgtaatgagtttttgtggcaaagtgtattaagcaatttttcattatcttgaagttccacaaagtggagaatatttatattctcacatgcattttaggcacttttgatatgtgaaaatagatgtattttctgatgcatttggttaataaatattaatctgaacattttcatgttctttgctattttgaattccattatagattcatgaataaagtcattactagagaaaaaaaaaaa

SEQ ID NO: 90 - DNA, 3251 bp, Homo sapiens
  CDS (105)..(2174)
cggtcgacgatttcgtcaaatgttgtttatcaggaattcttattggtttatggaagtaacaccggttggtgattggctataccttgttgagctataagaaccacatgccctgggaagaaccagcaggtgagaagcccagttgctctcacagtcagaaggcgttccacatggagcctgcccagaagccctgcttcaccactgacatggtgacatgggccctcctctgcatctctgcagagactgtgcgtggggaggctccttcacagcctaggggcatccctcaccgctcgcccgtcagtgtggatgacctgtggctggagaagacacagagaaagaagttgcagaagcaggcccacatcgaaaggaggctgcacataggggcagtgcacaaagatggagtcaagtgctggagaaagacgatcattacctctccagagtctttgaatctccctagaagaagccatccactctcccagagtgctccaacgggactgaaccacatgggctggccagagcacacaccaggcactgccatgcctgatggagctctggacacagctgtctgcgctgacgaagtggggagcgaggaggacctgtatgatgacctgcacagctccagccaccactacagccaccctggagggggtggggagcagctggctatcaatgagctcatcagcgatggcagtgtggtctgcgctgaagcactctgggaccatgtcaccatggacgaccaggagctgggcttcaaagctggggacgtcatcgaagtgatggatgccaccaacagagagtggtggtggggccgggtcgccgatggcgagggctggtttccagccagcttcgttcggctgagggtgaatcaggacgagcccgcggatgacgacgcccctctggccgggaacagcggagcggaggacggcggggcggaggcgcagagcagcaaggaccagatgcggaccaacgtcatcaacgagatcctcagcactgagcgggactacatcaagcacctgcgcgacatctgcgagggctacgtccggcagtgccgcaagcgcgcagacatgttcagcgaggagcagctgcgtaccatcttcgggaacatcgaggacatctaccgctgccagaaggccttcgtgaaggccctggagcagaggttcaaccgcgagcgcccacacctgagcgagctgggtgcctgcttcctggagcatcaagccgacttccagatctactcggagtactgcaataaccaccccaacgcctgcgtggagctctcccggctcaccaagctcagcaagtacgtgtacttcttcgaggcctgccggctgctgcagaagatgattgacatctccctggatggcttcctgctgactccggtgcagaagatctgcaagtaccctctgcagctggccgagctgctcaaatacacgcacccccagcacagggacttcaaggatgttgaagccgccttgcatgccatgaagaacgtggcccagctcatcaacgagcggaagcggagacttgagaacatcgacaagattgctcagtggcagagctccatagaggactgggagggagaagatctcttggtcaggagctcagaactcatctactcgggggagctgactcgagttacacagcctcaagccaaaagccagcagcgaatgttctttctctttgaccaccagctcatctactgtaagaaggacctgctccgccgcgacgtgttgtactacaagggccggctggacatggacggcctggaggtggtggacctggaggacgggaaggacagagacctccatgtgagcatcaagaacgccttccggctgcaccgtggcgccacaggggacagccacctgctgtgcaccaggaagcctgagcagaagcagcgctggctcaaggcctttgccagggagagggagcaggtgcagctggaccaggagacaggcttctccatcactgaactgcagaggaagcaggccatgctgaatgccagcaagcagcaggtcacagggaagcccaaagctgttggccggccctgctacctgacgcgccagaagcacccagccctgcccagcaaccggccccagcagcaggtcctggtgctggcggagcccaggcgcaagccatctaccttctggcacagcatcagccggctggcacccttccgcaagtgaactggtccctgcctgacagcacctgctgggccttcctgccagtggcccccagtttttcttccccgaggcccactcggcctggccttcctctgcctgcaagtgagcagggatgggctggggagttgcttgtgccaccaagacgtgccaggtctgtactcctgttgtctttttccctgctcctggtgccctgaagagaccagcaagggggcagaccccgcactcgccacaccgccgctgcagcttgggccccatccgccctctggacctgtgtagggcctcactgctggagcggggaaaccgcagctcagcccaggcccagctggggagaaggcgctacctgcgtgggaccctcttctctggaaacctaatcctcctttcatttcctctgggcaggactctctggccttctgtggcctgcaatgccaggccatgtgcccctctgccctctagttctccaagtccccagcccggccagtggtgccaggcagcttgccacttgggagggcagaagccaggaattccacacccttgtgttgcgcccggagcccgcccttcgcctcccagcccctcaagacaccgctggctgctggacaccctcttcacttgtgtgtgtgtgtgtagcggaaaaggacaagacggtgcagtcggctgcatactcccagtcgggagtgtggtcagtctgcctgctgctgtgcggtagctccagaaccacctcgttcctggttttgtttggattttggcatcttgtttttctaacaacaaacaatggagaaaaagaattgattcttagtgacacagaagattgccttacgctcgtgagcgtgagaagccataagagagagaccgaattctgtggctcagcacacaggactgacccacagcccaggcagcgggtgtgtggagatggcgccctgtcctgccaaggggcgccaggagcagagccagggcctggcgagctggcgtggagcccacaggattcagcagcatggacagtcactcttgcactattccttctccaagccagaaaccacatttaatttcataaataaatttatgaaaagtaaaaaaaaaaaa

SEQ ID NO: 91 - DNA, 361 bp, Homo sapiens
  CDS (42)..(299)
cgatccatagctaagacgccaggtcccccggaaacctagaaatggaaccattgaaatttagggatgtggccatagaattctctctggaggagtggcaatgcctggacactatacagcagaatttatataggaatgtgatgttagagaactacagaaacctggtcttcttgggtattgttgtctctaagccagacctgatcacctgtctggaacaagaaaaagagccttggactagaaagagacataggatggtggccgaacccccaggatctctttctgttacccaggctggagtgcagtgactgcagcttcaaccttcagggctcaagtgctcctttcacctcagcctcctgactagctg

SEQ ID NO: 92 - DNA, 1561 bp, Homo sapiens
  CDS (48)..(1343)
gcgtccgcccacgcgtccgcccacgcgtccggtgaggggaggcagaaatggaggaacgggcgttcgtcaaccccttcccggactacgaggccgccgccggggcgctgctcgcctccggagcggccgaagagacaggctgtgttcgtcccccggcgaccacggatgagcccggcctcccttttcatcaggacgggaagatcattcataatttcataagacggatccagaccaaaattaaagatcttctgcagcaaatggaagaagggctgaagacggctgatccccatgactgctctgcttatactggctggacaggcatagcccttttgtacctgcagttgtaccgggtcacatgtgaccaaacctacctgctccgatccctggattacgtaaaaagaacacttcggaatctgaatggccgcagggtcaccttcctctgtggggatgctggccccctggctgttggagctgtgatttatcacaaactcagaagtgactgtgagtcccaggaatgtgtcacaaaacttttgcagctccagagatcggttgtttgccaagaatcagaccttcctgatgagctgctttatggacgggcaggttatctgtatgccttactgtacctgaacacagagataggtccaggcaccgtgtgtgagtcagctattaaagaggtagtcaatgctattattgaatcgggtaagactttgtcaagggaagaaagaaaaacggagcgctgcccgctgttgtaccagtggcaccggaagcagtacgttggagcagcccatggcatggctggaatttactatatgttaatgcagccggcagcaaaagtggaccaagaaaccttgacagaaatggtgaaacccagtattgattatgtgcgccacaaaaaattccgatctgggaattacccatcatcattaagcaatgaaacagaccggctggtgcactggtgccacggcgccccgggggtcatccacatgctcatgcaggcgtacaaggtctttaaggaggagaagtacttgaaagaggccatggagtgtagcgatgtgatttggcagcgaggtttgctgcggaagggctacgggatatgccatgggactgctggcaacggctattccttcctgtccctttaccgtctcacgcaggataagaagtacctctaccgagcttgcaagtttgcagagtggtgtctagattacggagcacacgggtgccgcattcctgacagaccctattcgctctttgaaggcatggctggcgctattcactttctctctgatgtcctgggaccagagacatcacggtttccagcatttgaacttgactcttcgaagagggattaaaaggtgcaaaaagacaactaaaatacccatttggaccaaaagccgccagattgcttagtgcctgacacagaaacaactgggaatcctgaaagagaagcagacaccgtcacaggcccctctggttagactagcatgagtgaccgaagccatccatcaacattttctaacagcaccctcatcaatataaaatatgacttcttcacaaaaaaaaaaaa

SEQ ID NO: 93 - DNA, 2438 bp, Homo sapiens
  CDS (205)..(2124)
ggtggaattccgcggagtcctgcggatggcgcacgcgcaaacctcctgtgatgcctgcgcctcctggccccgccttcggcacgagggagttccggatgtttagcgttaccatggatcctggaggtgcccgcgaacactgcttgtcgcctgggcaaccggagaggacgaagcaggacctaggtggcggcggtggtaccggctgcaatggtgtccaatcccgtgcatggcttgccctttcttccgggcacgtcctttaaggactctacgaaaacagccttccacagaagtcagacgctgagctacaggaacggctatgcaattgttcgacgtccaacagttgggataggcggagaccggctccagttcaaccagctgtcccaggctgagctggatgagttggccagtaaggcaccagtcttaacttatggccaacctaaacaagccccacctgcggattttattcctgcgcatgtggcctttgacaaaaaggtactgaaatttgatgcctatttccaagaagatgttcctatgtcaactgaggaacagtataggatccgtcaggtgaacatttactattatctagaagatgacagcatgtctgtcatagagcctgttgtagaaaattctggaatccttcaaggcaagttaataaaacgccagcggctagccaagaatgaccggggtgaccattaccattggaaagacctaaatcgaggaataaacatcacaatttatggcaaaactttccgcgttgttgactgtgaccaattcacacaggtatttttagaaagccaaggaattgagttaaatccaccagagaagatggctcttgatccttacactgaactccgaaaacagcctcttcgtaagtatgtcaccccatcagactttgatcaactcaagcaatttctcacctttgacaaacaggtccttcgattctatgcaatctgggatgatacagacagcatgtatggtgaatgtcggacctacatcattcattactatcttatggatgatacggtggaaattcgagaggtccacgaacggaatgatgggagagatcctttcccactcctaatgaaccgccagcgtgtgcccaaagttttggtggaaaatgcaaagaacttccctcagtgtgtgctagaaatctctgaccaagaagtgttggaatggtatactgctaaagacttcattgttgggaagtcactcactatccttgggagaactttcttcatttatgattgtgatccatttactcgacggtattacaaagagaagtttggaatcactgatttaccacgtattgatgtgagcaagcgggaaccacctccagtaaaacaggagttgcctccttataacggttttggactagtggaagattctgctcagaattgttttgctctcattccaaaagctccaaaaaaagacgttattaaaatgctggtgaatgataacaaggtgcttcgttatttggctgtactggaatcccccatcccagaagacaaagaccgcagatttgtcttctcttactttctagctaccgacatgatcagtatctttgagcctcctgttcgcaattctggtatcattgggggcaagtaccttggcaggactaaagttgttaaaccatactctacagtggacaaccctgtctactatggccccagtgacttcttcattggtgctgtgattgaagtgtttggtcaccggttcatcatccttgatacagacgagtatgttttgaaatacatggagagcaacgctgcccagtattcaccagaagcactcgcgtcaattcagaaccatgtccgaaagcgagaagcgcctgctccagaagcagaaagcaagcaaactgaaaaggatccaggcgtgcaggaattggaagcattaatagacacaattcagaagcaactgaaagatcactcatgcaaagacaacattcgtgaggcatttcaaatttatgacaaggaagcttcaggatatgtggacagagacatgttctttaaaatctgtgaatcgcttaacgtcccagtggatgactccttggttaaggagttaatcaggatgtgctctcatggagaaggcaaaattaactactataactttgttcgtgctttctcaaactgacctgctgatgagaaaatgcaagacaatttttgatactggaactatgctttgaaatacaccttacactcttcatagaggcatttacagggttcctgaagttttatttctgttttggttcttatttcactcctactgaagtcgaaactaaattggatctaataggatctaagattggtgccttatttagggtgataggggtatagcaatgtctaattttgtgtgtcaaattgacttggccacagggggcccaaatatttcctttctttctttttaaaaaaataaatttttttagagatgggaaaaaaaaaaaa

SEQ ID NO: 94 - DNA, 1474 bp, Homo sapiens
  CDS (59)..(1078)
cgccgggtttccctcatgatcccgggcgggcggcggcggcggcagaggcggcgggaggatgacctcttaccgggagcggagtgccgacctggcccgtttctacactgtcaccgagccccagcgacacccgaggggctacacagtatataaggtcaccgcccgggttgtttcacgaagaaatccacaggatgtccaggagataattgtatggaatagatacaccgtttttaacaaactacacctagaactatggctaattcacaaaaacttatttcgtcattcagagttgtttcctccatttgctaaaggaatagtgtttgggcgatttgatgaaactgttatagaagagagaagacaatgtgctgaagacctgctacagttctctgccaatattcctgctctttacaatagtaaacagcttgaagactttttcaagggtggaataattaatgatagttctgaattaattggtcctgctgaagctcactcagattccctcattgatacctttcctgagtgtagtacggaaggcttctccagcgacagtgatctggtatctcttactgttgatgtggattctcttgctgagttagatgatggaatggcttccaatcaaaattctcccattagaacttttggtctcaatctttcttcggattcttcagcactaggggctgttgcttctgacagtgaacagagcaaaacagaagaagaacgggaaagtcgtagcctctttcctggcagtttaaagccgaagcttggcaagagagattatttggagaaagcaggagaattaataaagctggctttaaaaaaggaagaagaagacgactatgaagctgcttctgatttttataggaagggagttgatttactcctagaaggtgttcaaggagagtcaagccctacccgtcgagaagctgtgaagagaagaacagccgagtacctcatgcgggcagaaagtatctctagtctttatgggaaacctcagcttgatgatgtatctcaggtatgtctcatattttgttgtgtgttttcttcagtgattttttgctgtctggtctctctgctttatttctaattagaatgttataggattttgattttttgaattttattaatgattttcataaaggttggtggtagaaagaaatgcattatagcaaaccaccaaatgtggaataaaataagacttgctttctccttttcttggacttttattagattcttactgtacccttagtctcctcatctggagatgagacagcaacttatactggcatgatatctatttggatttggacgttttaccgttatattgggactcttggataactgctctccaaatgtactgctttatgttcttagctatacatgataagcctaaaatgtgcgcgctataccaatctgcgcccttaaatacaaaaccataattgtatcatagattattatgatattatgcacatcctctaca

SEQ ID NO: 95 - DNA, 1288 bp, Homo sapiens
  CDS (773)..(1015)
ggaattccctagcagatagaggacttggtctgaccttcagggttgtgatggggcaggttgggaggtgggcggggagtctctgtggtctgggtgctgaggttgacccgatgggcaggtgaagaaaatcaccttctccattccccttgatttctttatcgtgtgccgcacgaggcatgctgaagggacacacacctttccccctttttatttacaaagtagagagctgagaaagacagctcatgttctgttttgttttgtacacattatctttctcaagagatgtgatgtccttaagtaaactgacctgccttcatggcttgtcctgtaatgaatgcgttcaagacagtgttttggggacaggaaagaggcattcttaggtaagcggcggtgggggatggggtggggtggagaggaaacccttctaggaagtagttcaatgaaaaacctaaaaatgcccaaataaacattcgcttacatattatatatcttgggcttctttttatgacagttcattcagggacccagtcagtaaacaggtagttaacttcgtgtaaccaagcaagggttttgtttatcttttttaaagtagaaaaaagtgaggctcaaactctctctttctccttgtcataactattggtttacagtctttatttgtttaaaagtaaagcacattgtatgtatttatttggcaatacatgaggccattaaaaccctgagcctaaggtaccacagttagtctcatttgcctcttgtcctgtgaactccacttagaatgtcattgaacttgggcagacataattctagtgtctgttccaaacgcactgtgtcacagaagctagaattaccattagaggcacaaacccctgagaatacacaagggggcacgcttccagtagatgtgttggggaaggaggagggcagaggggacaggggacaggattcagctttgtggtgggtcctgagggttcctaccaggggtagccaggatctgggaaacagatcagcgactctagtctgaagtggctgcctggttcgggggctgccttcagcaagattcaggcaggagagacggaaatagccaccttccaggcgtgagtcctggagataaaaatggattttaacctaggactgccgggagctggccctccgcggctgctcagactagggctgtgtgggctggctctcgcctgtttccggaggataactggcttggttctctttatggcttggcttcattccgacccttgggtggggccacatccaacccactgcccactgggtgtgcgtg

SEQ ID NO: 96 - DNA, 1888 bp, Homo sapiens
  CDS (505)..(960)
agtgcggcgcagcgcagctcctgaggttttggttatgaacaggattcggattcacgtcttgccaaccaatcgggggaggatcactccagtgcccaggtctcaggaacctctgtcttgtgcattcactcatcgtccatgctctcaccctcgtctggaggggcaggagttttgcattaagcatatccttgaagacaagaatgcacccttcaagcagtgtagttatatatcgacgaagaatggaaaaagatgtcccaatgctgccccaaagccagagaagaaagatggggtgtccttctgtgctgaacatgtccgtaggaatgccctggcacttcatgctcaaatgaagaagaccaacctagggcctgtgggtgaaacactcctgtgccagctgagctcatatgctaagacagagctggggtctcagactccagaaagtagtcgcagtgaagccagccgaatactagacatgctggtgtctacacggcagaagaagtggccctgattatgcgtgaaaagctaattcgtttgcagtcgttgtatattgatcagtttaaacgacttcagcatctgctcaaggagaagaagcgccgatacttacataatcgcaaagtggaacatgaagctctaggcagtagtctcctgactggcccagagggacttttggccaaagaacgagagaacttaaagcgattaaaatgtctgcgacgataccgccagcgctatggagtggaagccttactgcataggcagttgaaggaacggagaatgctggccacagatggtgctgcccaacaggcccataccactcgttccagtcagaggtgcttggcctttgtggatgatgttcgttgttccaatcagtctcttccaatgaccagacactgccttacccagaaagatgcgactgccattggtgacctgttaactctttactgtggtctaatggagacagcactcgactgaaagtgaaggacccagactctagttgacttggatgttgtgggtgatggtatgcagtgtcctccttcacctttgctttttgatccttcactaacccttgaagatcatttagtcaaagaaattgctgaagacacagtggatattttgggccagatgcagatggctggagatgggtgcagatcccagggatctcgaaattctgagaaagcctctgcaccattgtctcagagtggattggctactgcaaatgggaagccagaacccacttctattagttgatagtttggggaaccattttactttggtggatttaaatttctcgttcttcaaagaagtatttctgatcatctctcacaaaacacaggcaacccagactaccttgtttttcttctggattgagtattatagtcaaacgtaaagccaaattttgaggacgtggaccgtgggtttcttcccactcagggcaaggaagagaaagagagataatccctatcaaagcttctgggattatttgggactatacctaaaaggaaagtgacatctttgtaatgggatttcccaagtcatggatagaaatccacttaagtagctaggtgggagctgtctttgtgagtggtgtctttgagatactgatggccctaatatcggttatctctatctgaagacctgcagtttagcttttcttcacctctacttaattgggcagtctttaacccctttccctggtgaactctggctttttatcctctgagaaaacagcccacaggactgggtcctccttatccgtcttgcttttaacctatgtaaatttctgtggttgctatcttatgtaaaatatagtaaaaatttattgtatatagtttctattaaatgttaaagaaaatgttatgaaaatatcaaacagtcacctgaattgaaaaaaaaaaaa

SEQ ID NO: 97 - DNA, 1488 bp, Homo sapiens
  CDS (63)..(1364)
gagcccggcgagggcgccggtgctttgttctgtctgaggccaggaagtttgaccgcgctgccatgccgaaccgcaaggccagccggaatgcttactatttcttcgtgcaggagaagatccccgaactacggcgacgaggcctgcctgtggctcgcgttgctgatgccatcccttactgctccgcagactgggcgcttctgagggaggaagaaaaggagaaatacgcagaaatggctcgagaatggagggccgctcagggaaaggaccctgggccctcagagaagcagaaacctgttttcacaccactgaggaggccaggcatgcttgtaccaaagcagaatgtttcacctccagatatgtcagctttgtctttaaaaggtgatcaagctctccttggaggcattttttattttttgaacatttttagccatggcgagctacctcctcattgtgaacagcgcttcctcccttgtgaaattggctgtgttaagtattctctccaagaaggtattatggcagatttccacagttttataaatcctggtgaaattccacgaggatttcgatttcattgtcaggctgcaagtgattctagtcacaagattcctatttcaaattttgaacgtgggcataaccaagcaactgtgttacaaaacctttatagatttattcatcccaacccagggaactggccacctatctactgcaagtctgatgatagaaccagagtcaactggtgtttgaagcatatggcaaaggcatcagaaatcaggcaagatctacaacttctcactgtagaggaccttgtagtggggatctaccaacaaaaatttctcaaggagccctctaagacttggattcgaagcctcctagatgtggccatgtgggattattctagcaacacaaggtgcaagtggcatgaagaaaatgatattctcttctgtgctttagctgtttgcaagaagattgcgtactgcatcagtaattctctggccactctctttggaatccagctcacagaggctcatgtaccactacaagattatgaggccagcaatagtgtgacacccaaaatggttgtattggatgcagggcgttaccagaagctaagggttgggagttcaggattctctcatttcaactcttctaatgaggaacaaagatcaaacacacccattggtgactacccatctagggcaaaaatttctggccaaaacagcagcgttcggggaagaggaattacccgcttactagagagcatttccaattcttccagcaatatccacaaattctccaactgtgacacttcactctcaccttacatgtcccaaaaagatggatacaaatctttctcttccttatcttaatgatggtactcttttcaatttctgaaaacagtaacaggcccaacttccttcttactacagtcatattaaacagatcacatcaatgacaaatgtcactactataaaaactaaaaaaaaaaaa

SEQ ID NO: 98 - DNA, 2208 bp, Homo sapiens
  CDS (73)..(2112)
gatgctgataaagagaaagatttgcagaaatttcttaaaaatgtggatgaaatctccaatttaattcaggagatgaattctgatgacccagttgtgcaacagaaagctgtcctggagacagaaaagagactactgcttatggaggaagaccaggaggaggatgaatgcaggaccaccttgaacaagactatgatcagtcctccacaaactgctatgaagagtgcagaagaaataaactcagaggccttcttggcatctgtggagaaggatgcaaaggaacgagccaagagaagaagggaaaacaaagtcttggcggatgccctaaaagaaaaagggaatgaagcatttgctgaaggcaattatgaaacagctatcctgcgctacagtgagggtttggagaagctgaaggacatgaaagtgctgtacaccaaccgagcccaggcttatatgaaacttgaggactatgagaaggcactggtggattgtgagtgggctctcaagtgtgatgaaaaatgcacaaaagcatattttcacatgggaaaagccaacctggccctgaagaactacagtgtgtctagagagtgttataagaagatcttagaaataaaccccaagctgcaaacccaggtgaaaggttacctgaatcaagtagatcttcaggaaaaagcagaccttcaagaaaaggaagcccacgaactgctggattcaggaaagaacacagccgtgaccaccaagaacctcctggagaccctttccaagcctgaccagatccccttgttctatgctggggggattgagatcctgactgaaatgataaatgagtgcacagaacaaactttattcagaatgcacaatggatttagtatcatcagtgacaacgaggtcataagaaggtgtttttccacagcaggaaatgatgcagttgaagaaatggtctgtgtgtctgttctcaagctctggcaagcagtgtgcagcaggaacgaggaaaaccagcgtgtgctagtgatacaccatgacagggccaggctgttggccgccctcttgtcctccaaggtcctggccatccggcagcagagctatgccctgctgctgcatctcgcccagactgagagcggacggagcctgatcatcaaccaccttgacctgaccagattattggaagcgctggtgtcatttcttgatttctcggataaggaggccaacactgctatgggactgttcacagacttggctctggaagaaagattccaagtctggttccaggccaaccttccaggtgttctccctgcactcacaggcgttctgaagacagatcccaaggtaagcagctcctcggctctgtgccagtgcattgccatcatgggaaacctcagtgctgagcccactacccgaagacacatggcggcctgtgaggaatttggggatggctgcttgagcctcctggccaggtgtgaggaggatgtggacctgttcagagaggttatctacacactcctgggactcatgatgaacctgtgtcttcaggctccctttgtctctgaggtttgggctgtggaggtgagcagaaggtgcctgtctttactaaacagccaggatggaggaatcctgacaagagctgctggtgttctgagccggaccctttcttcctctctgaaaattgttgaggaggccttgcgagcaggagtggtaaagaaaatgatgaaattcctgaagacaggaggtgagactgcatcacgttatgctataaagatactagctatctgcacgaatagttatcatgaagctcgggaagaagtaataagactggataaaaagttgagcgttatgatgaagctgctcagctcggaggatgaggttctggtgggcaacgctgccctctgccttggtaactgcatggaggtgcccaacgttgcgtcttccctgctaaagacggaccttttgcaggtcttgttaaagcttgcaggcagtgacacacagaagacggccgtgcaggtgaacgcaggcattgctctggggaagctgtgcacagctgagcccagatttgctgctcaactgagaaagcttcatggcctagaaattctcaactctacgatgaaatacatcagtgattcttgagagagacagggtttgtgtgcatttggggaacacacagatgcacaccgtgtgttgttcctatgctaataaagacctttgatgtatccacttcag

SEQ ID NO: 99 - DNA, 1686 bp, Homo sapiens
  CDS (117)..(539)
ccggacccttcttcagattgcacaggaggaggcggtagcggaacctttctcctccgcctcgttctcgcttccacccgggcccagttggggacggacgcactagaggcgacctaaacatggagacagcgggcgctgcaactgggcagccggcctctgggctggaggctccggggtccacgaatgaccggcttttcctggttaaaggtggaattttccttggtaccgttgctgcagcgggaatgctagctggatttattacaacattatcattggctaaaaagaaaagccctgaatggttcaataagggaagtatggccacggctgcattaccggaaagcgggtcttcccttgccttgcgagctctgggctggggctccctgtatgcatggtgtggggttggtgtgattagcttcgcagtctggaaagctttaggagttcacagtatgaacgactttcgaagtaaaatgcaatcaatatttccaacaattcccaagaactccgaatcggctgttgagtgggaggaaacattgaaatccaaatgagatgagcatggatgaatttcaaaatgcttgttacagaaaggggtggctctggagacaccatgacagcaaaaggactgggactgatttctcccaggaacatgggcagattgctgactgaaccagtgcactggatagcattcagcctcatcacaggagagtatgtgtgtgcgtgctgggggagggtaaagttttcccacagttaagaagactatttaaaaatagtaattacaggaataacttccttatgtggaggggaccccataggaaatgattctgtttgtaacagttgaagcaaatttcatactaaaaaagtttataataaaagtatgataagaaaatatttataaaacagaccccctaatagcaatagtactgcaatgtgtctaattaaaggagtttcaagagcctttcttgtcaatatatgacagaacttggaagtcttattctgattagccagactacaaagtgacagtcacctggtaagtcctgtatggtaggaagtgggtgtggctctcgggtcctaaatgtggtctgtgctttacagccatcacacacatgctagttatttacctgatgcccttgcttgaaggccctataaattcttatacttaaaacaaaaagccagtaatgagttgtgatcaccccaaaaggcacagttgggctaaaataatgatgatatcaggggtaaacatatttttttgagaagttggtctggatctctgaacactgacaatttgtcattttgtctcagttgtcaaagtaaaaaaagcccagttgtcatccgtcttcaatatttttaaccagaaagtcacctgagtacggagtcccaatataaagtatttgggaccacctccctaacaaagctgttagggtaaattctgtgtgcacgcccaactccctcctgtcttccacagtctcctacaaaaaaaacagatggagaataatgtctacatgcaattgtttttactgcaattgtattttaaaatattttcaagaagagaaatactttaatatgtcaatatgtccagagaaaaaacctgtagttaaatatcagttgtgcaatttcttcctacttgcctaggctctaattagtcagcaatcaggtttaataaaggacatttgaaatttctgtaaaaaaaaaaaa

SEQ ID NO: 100 - DNA, 2602 bp, Homo sapiens
  CDS (278)..(1615)
ccggtgtgtgggtctgtgacagggtccaacagggcctggtccgtgtccggtcccccaaatctgtcgtccctgcccccaggcattggcatcaacaaaagtcagaattcccgggaacttgaacagaggctgctaaattcccagtaattgctcctttggccttctagggactgacttcaaagaaggaaggaaagaatcaggcagtgcttcctcattctcttttaaaacccgcttcccgctgagtctgcacccaggagaccagagagcaccttgcccttccatggaaactcaggctgatctcgtatctcaggaacctcaggccctgcttgacagtgctcttccttcaaaagttcctgccttttccgacaaggacagcctgggggatgagatgttggcggctgcgctcctaaaggccaagtcccaggagctggtaacctttgaggatgtagctgtgtacttcatccggaaggagtggaagcgtttggaacctgctcagagggacctctatagagatgtgatgctggagaattacgggaatgtgttctcactggatcgtgagaccaggactgaaaatgatcaagaaatttctgaagacacaagatcacatggggtcctactgggaagatttcaaaaggatatttctcagggtctcaagtttaaagaagcctatgaacgagaagtcagtctgaaaaggccgctggggaactcccctggagaaagactgaacaggaaaatgccagattttggtcaagtgacagttgaggagaagctaacccccaggggagagagaagcgagaaatataatgattttgggaacagcttcactgtgaattccaaccttatctcacatcagagactccccgtgggagacagaccccataagtgtgatgaatgtagcaagagctttaatcgaacttcagaccttattcaacatcagagaatccacactggggaaaagccctatgaatgtaatgagtgtgggaaggccttcagccagagctcacaccttattcagcatcagagaatccacactggggaaaaaccttatgaatgtagtgattgtgggaaaaccttcagctgtagctctgccctcattctgcatcggaggatccacacgggggagaaaccctatgaatgtaatgagtgtgggaagaccttcagctggagctccaccctcacccaccatcagagaatccacactggtgagaaaccctacgcctgcaatgaatgtgggaaggccttcagcaggagctcaacccttattcaccatcagagaatccacactggagaaaaaccctatgaatgtaatgaatgtgggaaagccttcagccagagctcacacctctatcagcaccagagaatccacactggagagaagccctacgaatgtatggaatgtggaggaaagtttacctacagttcaggccttattcagcatcaaagaatccacaccggggagaacccctatgaatgtagtgagtgtgggaaagccttcaggtacagctcggctcttgttcgccatcagagaattcacactggagagaagcctttgaatgggatcggcatgagcaaaagctccctcagagttacgaccgagttaaatatcagagagtccacgtgaaagagccacacacccattttcctcactttccctgagtctcaagagctcttgccttaccctataaatctcaacagcttaggatgtgtccctttcaactcagacttttcattttagagaatggggcagatggggcaaatcgttgaattttcccagaaatcacaccagccttagaaagcgtcaaggcaagtggatggcgtgctgggaatagaaagcagctctgggaccagttaccccatttaggaaaggagtttgcactaaactgtttttctcacagcagaggaacctttccaaggtggggatggaagcacagtcgggacagaattcgatggattcctttagttggagtccgcgtagtcagcacagacagcagtggaaaggacgctctgggtcctgttatttgctagggagggtaaagggagactatttcaaagctactgttcctagtccagctttaagtttcggtaagaaacatgctgttttgtttcatgatttcgttaattatggaaatttggcattgagggattattttattgagggtagaagagattccagaatcatcatctgtgatgatggtgtcctttagggctcttggagcagccagaccatgtttccaagagaaacctggtgatattgccagcagaccccctgccatcccccccagttgtcctggggctgaatgggcaaatctgtccaaacagctagtaaccggctgtgagggagagggtcagaagcacttagcgttggcctctgattgctgtcctctcttgtcctcttcccactccaatgatgaaaatgattttctctaaatgcctgggtaaggatgctttcaaggagctcacttggcctgcttgccctgccctctcacctctgacacccagccccaggagccagaccactcctgcctccacctctgactcttcagcagctgaagattaatgcagagaaagagcaaagcccaaaagggagaaaaaaaaaacaaaaaaa

SEQ ID NO: 101 - DNA, 2411 bp, Homo sapiens
  CDS (17)..(1747)
tgcgtccggtgcggcgatgctgaccccggcgttcgacctcagccaggatccggacttcctgactatcgccatccgcgtgccctacgcccgggtctccgagttcgacgtctacttcgaggggtctgacttcaagttctacgccaagccatactttctcagattaacccttcctggaagaattgtagaaaatggaagtgagcaagggtcctatgatgcagataaaggaatttttaccattcgcctgcccaaagaaacccctggccagcattttgaggggctgaacatgttaactgctcttctggcaccaagaaaatccaggacagcaaaaccacttgtggaagaaataggtgcttctgagattcctgaggaagtagttgacgatgaagagtttgattgggaaattgagcagacaccctgtgaagaggtatcagaaagtgctttgaatccgcagtgccactatggatttggaaacttacgatcaggagtgttgcaacggttacaggatgaactgagtgatgttattgatattaaggatccagatttcacccctgcagctgaacgaagacagaagcgcctggccgctgagctggccaagtttgatcctgatcattatctagctgacttttttgaagatgaggcgattgaacagattttgaagtataatccttggtggactgacaaatattcaaaaatgatggcctttttggaaaagagtcaggaacaagaaaatcatgctacattagtgtctttttctgaagaagagaagtatcagctacgaaaatttgtcaataaatcttatctgctggacaagagagcctgtcgtcaagtgtgctacagtttgattgatatccttctggcatattgctatgaaacccgtgtcactgaaggagagaagaatgttgaatctgcatggaatatcaggaaactgagtccaacactatgctggtttgagacttggactaacgttcatgatatcatggtgtcttttggaagaagggtgttgtgttacccactctatcgccatttcaagctggtgatgaaggcctacagggacactataaagatattgcaactgggtaaaagtgcagttttaaagtgtctcctggatattcacaaaatttttcaggaaaatgacccagcgtacatactgaatgatctctacataacagactactgtgtgtacattcagaaagtcaaatccaaaaagttggcagctcttgcagaagccttaaaggaagtctcccttacaaaggcccagctggggttagaactggaagaactagaagcagcagcactgcttgtccaggaggaagaaactgcattaaaagcagcccattcagtttctgggcagcagacactttgctccagctctgaggcaagtgattcggaggactcagacagcagcgtgtcatctggaaacgaagactcaggctcagattcagaacaagatgaactcaaagatagtccatctgagacagtcagttctttgcaaggtccctttcttgaagaaagcagtgcctttcttattgttgatggtggagtacgcagaaacacagccatccaggagtctgatgccagtcagggaaagccacttgcctcttcctggcctcttggagtgtctgggcctctgatagaggagcttggggaacaactgaagactacagttcaggtttctgaacccaagggcaccactgctgtaaaccgcagcaatattcaggagagagacggctgtcagacaccaaataattgactcttaggtggttttattcattgttgagaaatatggtagattgggtttcatttaccgaatgagaattcttcattttcactttgtaatttttcttagtatatagtcagcccactgtatttgtgtgttccacatctgtggattcaaccaactgcagatcaaaaatattgaagaaaaaatcgcatctgtaccaaacatgtacagacttttttcttgttattattctctaaataatacagtatgacaactatttccacagcatttacattgtattgggtaatataagtaatctagtgatgatttaaactgtgcaggaggatgtgggtaggttatatgcaaatactgcaccattttttatcaggggcttgagcatctgaggattttagtatcctcaggagtcctggaaccaaccccccacagatacggggacaactttatgacattgtttttcaaccaatgaatgtttataccttttgttttccttgccgcgactgtgaagataaagttcaaaagtatttttaccaaagtgtagctaatatttcaagctgaaaataatagttctactgcccgtgtctccagaatgtagagcccatcaatatttttattttaggaggtgtacttgacacccaataaactgcacgtatcaaaagtgaaaaaaaaaaaa

SEQ ID NO: 102 - DNA, 2206 bp, Homo sapiens
  CDS (200)..(1612)
caggacttccgcacgagagaagagagatttaaataggcttaaaaagttaggtgacagcagcaaaaattcagactgttaatctgtcagctctaacactgatgcagataccactcaggaaaaaaacaatgcaacttctaaccgaaaatcttcagttggcgtaaaaaagaatagcaagagcagaacgttaacgaggcaatctatgtcaagaattccagcttcttccaactctacctcatctaagctaactcatataaataattccagggtaccaaagaaactgaagaagcctgcaaagcctttactttcaaagataaaattgagaaatcattgcaagcggctggagcaaaagaatgcttcaagaaaactcgaaatgggaaacttagtactgaaagagcctaaagtagttctgtataaaaatttgcccattaaaaaagataaggagccagagggaccagcccaagccgcagttgccagcgggtgcttgactagacacgcggcgagagaacacagacagaatcctgtgagaggtgctcattcgcagggggagagctcgccctgcacctacataactcggcggtcagtgaggacaagaacaaatctgaaggaggcctctgacatcaagcttgaaccaaatacgttgaatggctataaaagcagtgtgacggaaccttgccccgacagtggtgaacagctgcagccagctcctgtgctgcaggaggaagaactggctcatgagactgcacaaaaaggggaggcaaagtgtcataagagtgacacaggcatgtccaaaaagaagtcacgacaaggaaaacttgtgaaacagtttgcaaaaatagaggaatctactccagtgcacgattctcctggaaaagacgacgcggtaccagatttgatgggtccccattctgaccagggtgagcacagtggcactgtgggcgtgcctgtgagctacacagactgtgctccttcacccgtcggttgttcagttgtgacatcagatagcttcaaaacaaaagacagctttagaactgcaaaaagtaaaaagaagaggcgaatcacaaggtatgatgcacagttaatcctagaaaataactctgggattcccaaattgactcttcgtaggcgtcatgatagcagcagcaaaacaaatgaccaagagaatgatggaatgaactcttccaaaataagcatcaagttaagcaaagaccatgacaacgataacaatctctatgtagcaaagcttaataatggatttaactcaggatcaggcagtagttctacaaaattaaaaatccagctaaaacgagatgaggaaaatagggggtcttatacagaggggcttcatgaaaatggggtgtgctgcagtgatcctctttctctcttggagtctcgaatggaggtggatgactatagtcagtatgaggaagaaagtacagatgattcctcctcttctgagggcgatgaagaggaggatgactatgatgatgactttgaagacgattttattcctcttcctccagctaagcgcttgaggttaatagttggaaaagactctatagatattgacatttcttcaaggagaagagaagatcagtctttaaggcttaatgcctaagctcttggtcttaacttgacctgggataactactttaaagaaataaaaaattccagtcaattattcctcaactgaaagtttagtggcagcacttctattgtcccttcacttatcagcatactattgtagaaagtgtacagcatactgactcaattcttaagtctgatttgtgcaaatttttatcgtactttttaaatagccttcttacgtgcaattctgagttagaggtaaagccctgttgtaaaataaaggctcaagcaaaattgtacagtgatagcaactttccacacaggacgttgaaaacagtaatgtggctacacagtttttttaactgtaagagcatcagctggctctttaatatatgactaaacaataatttaaaacaaatcatagtagcagcatattaagggtttctagtatgctaatatcaccagcaatgatctttggctttttgatttatttgctagatgtttcccccttggagttttgtcagtttcacactgtttgctggcccaggtgtactgtttgtggcctttgttaatatcgcaaaccattggttgggagtcagattggtttcttaaaaaaaaaaaa

SEQ ID NO: 103 - DNA, 1300 bp, Homo sapiens
  CDS (165)..(662)
gttttcaggctcttggcggtgaaggtcagagtgcagacctgagaccactgctcaccgacttcagactccagtttatctgtgccccagcttcctcacttagtctcagaagacttaggctgaggcctcagaaggagatctccatcctttgtccagagcagaacaggatggccatgtcccaggaatcattgaccttcaaggacgtgtttgtggacttcaccctggaggagtggcagcaactggactctgcccagaagaacctctacagggatgtcatgcttgagaactacagccacctggtgtccgtggggtatctagttgcgaagcctgatgtgatcttcaggttgggaccaggtggagagtcctggatggcagatggggggaccccggtacggacctgtgcagaagtctggcaagttgatgagcagatagatcactacaaggaaagccaagacaaacttccttggcaagctgcattcataggcaaggaaacactgaaggatgaaagcggtcaagaatccagaacatgtagaaaaagcatttatctgagcacagaatttgattctgtaaggcaaagactccctaaatattattcgtgggaaaaggcattcaaaacatcatttaaactttcttggtcaaaatggaagctatgtaagaaagaaagatgatggatgtaaagcatattggaaagtatgcttccattataatcttcataaagctcaacctgcagagagattttttgaccctaatcaacgagggaaagccctccaccaaaagcaagcccttagaaaaagtcagagaagtcaaactggggagaaactctacaaatgtactgaatgtggaaaagtgtttatccagaaagcaaacttagttgtacatcaaagaactcacaccggagagaaaccttatgaatgctgcgaatgtgcaaaagccttcagccagaagtcaaccctcatagcacaccagagaactcacacaggggagaagccctatgaatgcagtgaatgtggaaaaacctttatccagaagtcaactctgattaaacataagaaaattcatatggagagagaccctataaatgcagtgtctgtgagaaagccttcagtaggaagtcaactctcattaaacatcagataattcatatgggagaaaccttatgaatgtaataaatgtgggaaatcttttagtgttaaatcaactctcattgtatgtcacagaacataaatgcataagttgcatgctattgtgaatagtgtgatgaaattttgcactgtcctgctctttcctgctcaggatgcaaatc

SEQ ID NO: 104 - DNA, 4004 bp, Homo sapiens
  CDS (1051)..(3174)
  misc_feature (1)...(4004): n = a,t,c or g
tcggcgctcccgggtcgacccacgcgtccggtgagtactctgttttgaaacatatgcttgaactataatgtgctttgttttagttttaaagttaaaaaaaggaaccaatgatttttctttttagtcaaaactctaacctttacagacgttttctgttaatcttcaggtcacaattaagatattattacttcattgactgtgtatgggggggggtgacattttaatctggactccaaatctaaaaatgtacatgttcgcttccattaccaggtacgatttgatagtgttggtggcctgtctaatcatatagcagctctaaaagagatggtggtgtttccattactttatccagaagtctttgaaaaatttaaaattcaacccccaagaggttgtttgttttatgggccacctggaactggaaagactctggttgccagagcacttgccaatgagtgcagtcaaggggataaaagagtagcatttttcatgaggaaaggtgctgattgtctaagtaaatgggtaggagaatctgaaagacagctacgattgctgtttgatcaggcctatcagatgcgcccatcaattattttttttgacgaaattgatggtctggctccagtacggtcaagcaggcaagatcagattcacagttctattgtttccaccctgctagctcttatggatggattggacagcagaggggaaattgtggtcattggtgctacgaacaggctagattctatagatcctgctttacgaaggcctggtcgctttgatagagaattcctctttagcctgcctgataaagaggcttgaaaagagattctaaagattcacaccagggattggaatcccaaaccactggacacatttttagaagagctagcagaaaactgtgttggatactgtggagcagatattaaatcaatatgtgctgaagctgctttatgtgctttacgacgacgctacccacagatctataccactagtgagaaactgcagttggatctctcttcaattaatatctcagctaaggatttcgaggtagctatgcaaaagatgataccagcctcccaaagagctgtgacatcacctgggcaggcactgtccaccgttgtgaaaccactcctgcaaaacactgttgacaagattttagaagccctgcagagagtatttccacatgcagaattcagaacaaataaaacattagactcagatatttcttgtcctctgctagaaagtgacttggcttacagtgatgatgatgttccatcagtttatgaaaatggactttctcagaaatcttctcataaggcaaaagacaattttaattttcttcatttgaatagaaatgcttgttaccaacctatgtcttttcgaccaagaatattgatagtaggagaaccaggatttgggcaaggttctcacttggcaccagctgtcattcatgctttggaaaagtttactgtatatacattagacattcctgttctttttggagttagtactacatcccctgaagaaacatgtgcccaggtgattcgtgaagctaagagaacagcaccaagtatagtgtatgttcctcatatccacgtgtggtgggaaatagttggaccgacacttaaagccacatttaccacattattacagaatattccttcatttgctccagttttactacttgcaacttctgacaaaccccattccgctttgccagaagaggtgcaagaattgtttatccgtgattatggagagatttttaatgtccagttaccggataaagaagaacggacaaaattttttgaagatttaattctaaaacaagctgctaagcctcctatatcaaaaaagaaagcagttttgcaggctttggaggtactcccagtagcaccaccacctgagccaagatcactgacagcagaagaagtgaaacgactagaagaacaagaagaagatacatttagagaactgaggattttcttaagaaatgttacacataggcttgctattgacaagcgattccgagtgtttactaagcctgttgaccctgatgaggttcctgattatgtcactgtaataaagcaaccaatggacctttcatctgtaatcagtaaaattgatctacacaagtatctgactgtgaaagactatttgagagatattgatctaatctgtagtaatgccttagaatacaatccagatagagatcctggagatcgtcttattaggcatagagcctgtgctttaagagatactgcctatgccataattaaagaagaacttgatgaagactttgagcagctctgtgaagaaattcaggaatctagaaagaaaagaggttgtagctcctccaaatatgccccgtcttactaccatgtgatgccaaagcaaaattccactcttgttggtgataaaagatcagacccagagcagaatgaaaagctaaagacaccgagtactcctgtggcttgcagcactcctgctcagttgaagaggaaaattcgcaaaaagtcaaactggtacttaggcaccataaaaaagcgaaggaagatttcacaggcaaaggatgatagccagaatgccatagatcacaaaattgagagtgatacagaggaaactcaagacacaagtgtagatcataatgagaccggaaacacaggagagtcttcggtggaagaaaatgaaaaacagcaaaatgcctctgaaagcaaactggaattgagaaataattcaaatacttgtaatatagagaatgagcttgaagactctaggaagactacagcatgtacagaattgagagacaagattgcttgtaatggagatgcttctagctctcagataatacatatttctgatgaaaatgaaggaaaagaaatgtgtgttctgcgaatgactcgagctagacgttcccaggtagaacagcagcagctcatcactgttgaaaaggctttggcaattctttctcagcctacaccctcacttgttgtggatcatgagcgattaaaaaatcttttgaagactgttgttaaaaaaagtcaaaactacaacatatttcagttggaaaatttgtatgcagtaatcagccaatgtatttatcggcatcgcaaggaccatgataaaacatcacttattcagaaaatggagcaagaggtagaaaacttcagttgttccagatgatgatgtcatggtatcgagtattctttatattcagttcctatttaagtcatttttgtcatgtccgcctaattgatgtagtatgaaaccctgcatctttaaggaaaagattaaaatagtaaaataaagtattttaacttcctgactattatggtacatataaagataaatgtcatgtgtaagatactgataaatatggaacttgctagacaagaccctgtagtaatagtataatagttgagtttgggcaactctaataaagttattttggtaacaatgtttatggcactttagaaataattagcagcgttaaattttgtntgtattaagcacttttaattttatccttcctaaaaatagtttattgtatctgacaagaaacttacttaaccattgtgtccttcccatcttttttgtcatcttttttttcttcaaatgccctcctcccatctgccttgagattcccttgtcttcacttaaaagccagagtgcaagtcatgatttgcgggagggctcttgaaccacttctggctgcaccacaattctgtacttgagtatcacagtcattgtttttgagacaaacatttttataattctaatttgggttaataaagattttaaatatttcttggtttacttttgtaattatatacacaacaaatgtattaataactaccttgttaaacaccttttaatagcacaaggtttttatatttgcaagctgttgatatctttctaaaactgtttaggttatagtctattgatactttttatatacaattttataaatataaatattataattttatattaatggtaaaaaaaaaaaa

SEQ ID NO: 105 - DNA, 2707 bp, Homo sapiens
  CDS (161)..(1714)
gtggttggttaccgccttttgcactagcagtagcaaggaaggggggtgggcgctctttctttttctcttagaagagggtttagcacaggttttttcgttctcacttccacaccaccttaccgcctcccgaccccccctctccccctccccacctatcgtcatgacggcctctccggattacttggtggtgctttttgggatcactgctggggccaccggggccaagctaggctcggatgagaaggagttgatcctgctgttctggaaagtcgtggatctggccaacaagaaggtgggacagttgcacgaagtgctagttagaccggatcagttggaactgacggaggactgcaaagaagaaactaaaatagacgtcgaaagcctgtcctcggcgtcgcagctggaccaagccctccgacagtttaaccagtcagtgagcaatgaactgaatattggagtagggacttccttctgtctctgtactgatgggcagcttcatgtcaggcaaatcctgcatcctgaggcttccaagaagaatgtactattacctgaatgcttctattccttttttgatcttcgaaaagaattcaagaaatgttgccctggttcacctgatattgacaaactggacgttgccacaatgacagagtatttaaattttgagaagagtagttcagtctctcgatatggagcctctcaagttgaagatatggggaatataattttagcaatgatttcagagccttataatcacaggttttcagatccagagagagtgaattacaagtttgaaagtggaacttgcagcaagatggaacttattgatgataacaccgtagtcagggcacgaggtttaccatggcagtcttcagatcaagatattgcaagattcttcaaaggactcaatattgccaagggaggtgcagcactttgtctgaatgctcagggtcgaaggaacggagaagctctggttaggtttgtaagtgaggagcaccgagacctagcactacagaggcacaaacatcacatggggacccggtatattgaggtttacaaagcaacaggtgaagatttccttaaaattgctggtggtacttccaatgaggtagcccagtttctctccaaggaaaatcaagtcattgtccgcatgcgggggctccctttcacggccacagctgaagaagtggtggccttctttggacagcattgccctattactgggggaaaggaaggcatcctctttgtcacctacccagatggtaggccaacaggggacgcttttgtcctctttgcctgtgaggaatatgcacagaatgcgttgaggaagcataaagacttgttgggtaaaagatacattgaactcttcaggagcacagcagctgaagttcagcaggtgctgaatcgattctcctcggcccctctcattccacttccaacccctcccattattccagtactacctcagcaatttgtgccccctacaaatgttagagactgtatacgccttcgaggtcttccctatgcagccacaattgaggacatcctggatttcctgggggagttcgccacagatattcgtactcatggggttcacatggttttgaatcaccagggccgcccatcaggagatgcctttatccagatgaagtctgcggacagagcatttatggctgcacagaagtgtcataaaaaaaaacatgaaggacagatatgttgaagtctttcagtgttcagctgaggagatgaactttgtgttaatggggggcactttaaatcgaaatggcttatccccaccgccatgtaagttaccatgcctgtctcctccctcctacacatttccagctcctgctgcagttattcctacagaagctgccatttaccagccctctgtgattttgaatccacgagcactgcagccctccacagcgtactacccagcaggcactcagctcttcatgaactacacagcgtactatcccagccccccaggttcgcctaatagtcttggctacttccctacagctgctaatcttagcggtgtccctccacagcctggcacggtggtcagaatgcagggcctggcctacaatactggagttaaggaaattcttaacttcttccaaggttaccagtgtttgaaagatgtatggtgatcttgaaacctccagacacaagaaaacttctagcaaattcaggggaagtttgtctacactcaggctgcagtattttcagcaaacttgattggacaaacggggcctgtgccttatcttttggtggagtgaaaaagtttgagctagtgaagccaaatcgtaacttacagcaagcagcatgcagcatacctggctctttgctgattgcaaataggcatttaaaatgtgaatttggaatcagatgtctccattacttccagttaaagtggcatcataggtgtttcctaagttttaagtcttggataaaaactccaccagtgtctaccatctccaccatgaactctgttaaggaagcttcatttttgtatattcccgctcttttctcttcatttccctgtcttctgcataatcatgccttcttgctaagtaattcaagcataagatcttggaataataaaatcacaatcttaggagaaagaataaaattgttattttcccagtctcttggccatgatgatatcttatgattaaaaacaaattaaattttaaaacacctg

SEQ ID NO: 106 - DNA, 711 bp, Homo sapiens
  CDS (258)..(524)
ggaaaatctcattttacttatgataaaaactgatgagttattatgtcctattggccctgtatttcccagggtgggaacaatgtctctgccaaagcttaggggctccctctcctaatgcttcacatccgtgttttctgttgccctcaccttctatactcccctcttgcactgagaccccacacccagcagctaatgttcactgcccagagcaaggagttgtcagccttacctctctgctccttctgtagtgtcacaccatgtctgaccggaaggcagtgatcaagaacgcagacatgtctgaggacatgcaacaggatgccgttgactgcgccacgcaggccatggagaagtacaatatagagaaggacattgctgcctatatcaagaaggaatttgacaagaaatataaccctacctggcattgtatcgtgggccgaaattttggcagctacgtcacacacgagacaaagcacttcatctatttttacttgggtcaagttgcaatcctcctcttcaagtcaggctaggtggccatggtgaaggtgtcagtggcggcggcagcgatggcaagcaggcggcgttgctgggactgttttgcactggagccagcatcaggatgtcctctcgaatggctgtgctactgcatggactgtatactcgatttcatgtgtatgtcgcagtaaacaaaaccaaacctcaaaaaaaaaaaaa

SEQ ID NO: 107 - DNA, 1062 bp, Homo sapiens
  CDS (654)..(935)
ctggtacaacaggtctctacaacgccaagatctaactaagctttaaaaggtcaagaagttttatggctgacaaaggactcgcgcaacgcagaaggcctttcccaccttaagcttccggggatctgggaattttacccccattctcttctgtttgtctgagtctcatctctctgcaagcaagggctgaaatcattttgtttggttgttttgagggagagaggcggggtgggggggtgcaaatctgccagcagctcttacgtaaggcatgttttattggggagggctgagcttttattttctcctctccagtggggttggcttttattgtttcttgtttgggtttggaatggaaatatggatagcagcataaagtacttttattttgacaaaattcatttttttcaacaatggagacatagatttgacccacaataacttctccccctctctttttactctgctcaaaaagcatctctcctcccattacccaaccttggtcataagtgtgcctggctggtttgcagatatttgttctgctttgtaaaaattggccattagtgcatttattgagatgatctctaaagagctatgccctgacctacccctgattctatgacattggggcccttcttttgctgaaactgccttacgtaatggttttactccttgaaagagatttgacggaatccattttatgccaagtgctgccctgcactgtttctgcaatatgtggtgtatgctgtggtgatcttgctgggaatgattataagtgtgtgtgtggtgggggagtgggtattacatgcattgctgaagagtcatcctggtgttcctcattcctcccaccttcccgtggtcattttaattacggggcagtgtcaccgcaaagggaggaaactcaaagccgaaagcaaaattccaggcctgattctggcttttgaggttcctggttcttgaagccaggcctgacccgactctcagatggggtcagtcccgtcgctttgcagactgaccctggaaatctacaaaatgcagattttcctgatttcctcttctcttgcccag

SEQ ID NO: 108 - DNA, 901 bp, Homo sapiens
  CDS (76)..(696)
tttcgtgctggagcggctgtgcgggctgcgtagcggtgctgggtcgggccgacgtgccacccacccggagccgggatgccagaagggccgttggtgaggaaatttcaccatttggtctccccccttgtgggtcagcaggtggtcaagacagggggcagcagtaagaagctacagcccgccagcctgcagtctctgtggctccaggacacccaggtccatggaaagaaattattccttagatttgatctagatgaagaaatggggccccctggcagcagcccaacaccagagcctccacaaaaagaagtgcagaaggaaggggctgcggacccaaagcaggtcggggagcccagcgggcagaagacccttgatggatcctcacggtctgcagagctcgtcccccagggcgaggatgattctgagtatttggagagagacgcccctgcaggagatgctgggaggtggctgcgtgtcagctttggtttgtttggcagcgtttgggtgaacgatttctccagagccaagaaagccaacaagaggggggactggagggacccttccccgaggttggtcctgcactttggtggtggtggcttcctggcattttataattgtcagttgtcttggagctcttccccagtggtcacacccacctgtgacatcctgtctgagaagttccatcgaggacaagccttataagctctaggccaggctcagcctgtctgctatacactgctggaccagagatacttctcagggctagggaacatcattaagaatgaagccttgtacagagctgggatccatcccctttctctcggttcagtcctgagtgcctcgcgtcgggaggtcctggtggatcacgtggtggagttcagtacagcctggctgcatggcaagt

SEQ ID NO: 109 - DNA, 986 bp, Homo sapiens
  CDS (100)..(936)
cccgaggctggcgggttttggcagtagctgtggctgcggctgccgggcctggggacgcgggcggcgaggccgcgtcgcagcctcctcgtctcgccggctatggctgcgctcggccggcccttcagcggcctccctctgagcggcggctcggacttcctgcagccgccgcagccggccttccccggccgggccttcccgccgggggctgacggcgccgagttggccccgcggccgggacctcgcgcagtccctagcagtcccgctgggagtgcggcgcgcggacgtgtttctgttcactgtaaaaagaaacacaagcgagaggaggaggaggatgatgattgtccagtaagaaagaaaaggataactgaagcagagctctgtgctggtcctaatgactggattctttgtgcacatcaggatgtagaggggcatggagtaaatcccagtgttagtggcctttccatacctgggatattagatgttatttgtgaagaaatggatcagacaactggagaaccacagtgtgaagttgcccgaaggaagcttcaggagattgaggacaggataattgatgaagatgaagaagttgaagctgacagaaatgttaaccatctccccagtcttgtcctttctgataccatgaaaacaggtttgaagagggaatttgatgaagtttttacaaagaaaatgattgagtctatgagccgtccttccatggagcttgttctctggaaacccctccctgaactcctttctgataagccaaagccatcctctaatactaagaactatacaggagagagccaagctaagcatgtagctgctggcactgccttccctcagagaactgaactgttttcggaacctcggccaacagggatgtctctttataatagtttggagacagctactagcacagaagaagagatggaactctagaaaccaatttctacactaaagttgtcaaatgttagaaaaaaaaaaaa

SEQ ID NO: 110 - DNA, 1893 bp, Homo sapiens
  CDS (760)..(1182)
tggtttaatctggataagctgaaagatagattgctatcaaaaaagttccccaagatgtgcatagccaaactgggatagaaggcaaactccccaaagctacctgctggttttgagaggggtggtaagacatggcaattcccaggagtagtagaaaataatatgcctgactaccaacagctcaagtatgcttatttgcacatcctagacttggtgtctgtaagactcagttaccacttttattttcctgtagctaggagttagcaaaaggaactggggccttccagccgagccactaaacctgtcttatttggaatggggattgtccagcaaagggagcaaacatgaattagatgttaagctattgagctgaagaaaagaaagcagttcacatttaggtgaaatagatgatgttatcaggaagccaggttcccaccagagtcggtgcttggtacctggtctctccagtctcaacagactcaggtcaggtctctcacccaggaagcaaccactcaataaaatagagaacatctgagaattacaaatgtctatgcttgattgctcctctaaatccagtgcataggttaaccctgcatgcccatttcttcctgggcttcttgatggcaatgtgttcttaaataactggtcttgtgttcatgctaaagacaaacttacatgaagtttttcagtttaagacattctagtgaatggctgctatgtgtttctggcactcattcctaaccaagtctttagagatttcagatgaccttaaagatgcaatatctttttctttctttctttctttctttttttctgagacaagagttgcgccctgtcgcccaggctggggtgctggagtgcagtggtgcgatctcagctcactgcagcctctgcttcccaggttcaagtgtttctcctgcctcagccttccgagtagctgggattacaggcatgtaccactatgcctggctaatttttatttctatatttttagtagagatggggtttcatcatgtttgccaggctggtctcgaactcctggcctcaagtgatccgcccacctcagcctcccaaagtgctgggattacaggcgcgagccaccgcgcctggccaaagatgcaaattcttgtttggatttatgctctgcctcttcccagcattttcttatctgtagccctgcttgcttgagagtatacttggataagaagtattgctgttgagggagctataagaaaaggattcttcttccagaagtaaagaactcatctttagagtacctttaaatgaattttgtttttctttcttattttgaggtggattggtcttctctttttttgggtttccagctcactgggactctcagaccttacctttccagctcaaacaccattagttaaattccttcattctcattagaatgcagcctgctgagtatgtgggtttcactgccggagtccatcatttagccagtatacatagaggaactgcttcgaatcaaggcaactggtgaagggcttagcatgttggcagcaatatcccagagattgaatctgtttgcattttcctcatctaggataacagctgcttgaagccagggctcttagccctttgcattccccttgagcgaggaagccacactgcctttctgtgtctggttcagagctcttccttcttggcatgttttctggactacatgcacatgggcagctatagattaatctgcaaaacctagtcacttacctacccataatatctgggaaggtgtggtatttgttttaaagaaacattgtttctttgggagggcagtttctgtctggactttgaggtggacttagttatccctacagttctttaactctcagcttttaataaaagatgaaatcagaaaaaaaaaaa

SEQ ID NO: 111 - DNA, 783 bp, Homo sapiens
  CDS (278)..(451)
atgatgctcttggaaaacacacacaggaaggcggaagttaaatgtgtacccaactacgaagtcagatgaggcaggatcacaccctggctgcccctctggtcactagatgccttgggcaggtaagctcacctcttctggcctcagtttctccatctgtgaaatgagtgtaacatctcataggctgtggtacggactcatgaattgatgcatataaagcgttcagtaagccttttctcttaataaaaaacccacaaaaccatcatcagctcaagattctatgcaaagagaagacggcacacccagcatggggtgtcccttgacgctgccagactcaagtgacttgaggttcctggcctttgagcccgcccctcccactcttccctcggccaggccaaggctcctccaagcctcagttaccctgtctttaaaagagcgcgctcctctgattctatagaatcctgaggctcaaagccaaagatgaacagcctggaagcagagccatcagagcggcaaagctgcccagggatccccgagaactcgctggggttagagatcaggaccctgagattcaggctctacacctgattcctcgtgcccccgtccgctacggggctgagttatgggcatcgtttgacatgggccactcggattcccttccaggcccttgcccgtgccgttccctctgcctggccaccggatgaagcaggaagacggactgcaagtagaccatttctagccctgcctagataaaggcagagggcgcagtgaggtcctgcgacgaaa

SEQ ID NO: 112 - DNA, 6339 bp, Homo sapiens
  CDS (533)..(4864)
ggaaaaaaaggaaggcgtgagggcgggcagcagcgacaggatgcttgtttttcgctctaccaaagtcgtctgaaggcgagacagcgggcccagggcgcaggacccaccgcagccccctgggcagtctcctcgccccgcgtccgcgtcgtctccggggcacttagtaaggggtggggagagcttgccctccctcttaagctgaggagaaacacccgaagacaccgcaggagcctgtgaaagtccctaggactccaagtgaggaagtgacactcccaggcgagccggcccgcggctgccagtctgcacggcctcggcacggcggccccggagcggcgcggggtggatctcaggctctgccggcccgcggcccgcggggtccatgcgcagggcccccagcccaagttcttccatcttccgatgcggccccccagagccgcggggcagccggtgatctagcccgggagcccatcttacagcggtgccaagcagaggggcggcagagacggaggggcagcctctttgggactaactcatgaagaacaagggtgctaagcagaagctgaaacgaaagggagccgccagcgcgtttggctgtgacctgacggagtatctggaaagctcgggacaggatgttccatacgttttgaagagctgtgcagaatttatagagactcacggcatcgtggatggaatctatcggctttcaggagtcacctcaaacatacaacggctaaggcaagagtttggctcagatcaatgtccagatctgacaagggaagtgtacctccaggacatccactgtgtgggctcgctttgcaagctctactttagggagctgcccaaccccctcctgacttatgagctctatgagaaattcacggaggcagtgtcgcattgccctgaagaaggccaactggcccgaatccaaaatgttatccaggagcttcctccatcccactataggaccttggaatacctgattcgacacctggcccatatcgcctccttcagcagcaagaccaacatgcacgcccggaacctggccctggtgtgggcgccaaacctcctcaggtctaaagaaattgaagccactggttgcaatggagatgcagccttccttgcagtccgggtccagcaggtggtgattgagttcatattgaatcatgtagatcaaatctttaacaacggtgcacctgggtctctggagaatgatgaaaaccggcccatcatgaagagcctgaccttgccagccctctccctgcccatgaagctggtgagccttgaggaagctcaagcccgcagcctggccactaaccatcctgctcgcaaggaaaggagggagaacagcctgcctgagattgtccctcccatgggcaccctcttccacactgtccttgagttaccagacaacaagcgaaagctctccagtaaatcaaagaagtggaaatcaatatttaacctgggacgttctggatcagactccaaatcaaaactgagtagaaatgggagtgtatttgtgagaggacagaggctctcggtggaaaaggctactatccgaccagctaaaagcatggactcactatgttcagtgcctgtggaaggaaaagaaaccaagggaaatttcaatcgaacagttaccaccggtggatttttcattccagcaacaaagatgcactccaccggcaccggcagctcatgtgacctcaccaagcaggagggcgaatggggccaggaggggatgcctcccggggctgagggtggctttgatgtgagcagtgatcgcagccatctccagggcgctcaggcccggcccccaccggaacagctgaaggttttccggcctgttgaggatccggagagcgagcaaacagccccaaagatgttgggtatgttctacacttcgaacgacagccctagcaaatccgtcttcaccagcagcctcttcccgatggagccctcgccgcgtaaccagcgcaaggcgctgaacatctccgagccctttgcggtatctgtgccgctccgcgtgtccgcagtcatcagcaccaacagcacgccgtgcagaacacccccgaaggagctgcagtctctttccagcctggaagagttttcttttcatggatcagagagcggaggctggccagaagaagagaaaccgctgggagctgagacttctgcagcttctgtacctaagaaggcaggtcttgaggatgccaaggcagtacctgaagcaccagggacagtggaatgcagcaaaggcctgtcccaggagccaggcgcccacctggaggagaagaaaaccccagaaagctccttgagctctcaacatttaaatgaattagagaagaggccaaatccggagaaggtggtggaggagggacgagaggctggtgagatggagtccagcaccctgcaggagagccccagggccagagccgaagctgtgcttctccatgagatggatgaagatgatctggccaatgccctgatctggcctgagattcaacaggagctgaaaatcattgaatctgaggaggagctctcatcgttgccacctcctgctctgaagaccagcccaattcagcctattctcgagtcgagtctggggccctttattccctcagagcctcctgggagcttgccttgtggctccttccctgctccagtctccacccctctggaggtgtggactagggatccagccaatcagagcacacagggggcttccacagcagccagcagagagaagccggaacctgagcagggcctgcacccagacctcgccagcctggctcctctggaaatagttccttttgagaaggcatctccacaagcaacagtggaagtaggaggcccaggcaatctgtctcctccactcccacctgctcctccccctccaactcctctggaggagtcaactccagtcctgctttcaaagggcagcccggaaagagaagactcatccaggaaattgaggacagatctctacatagaccagctgaagtcccaagacagccctgagatctctagcctctgtcagggagaggaggcaaccccaagacacagtgacaagcaaaattcaaagaatgctgcttctgaggggaaaggctgtggttttccaagcccaaccagggaggttgagatcgtctcacaagaagaggaggatgtaacccattcagtacaggagccttcagactgtgacgaagatgacactgtgacagacattgcccagcatggcctggagatggtggagccctgggaggaaccccagtgggtgacgagtccccttcactctcccaccctgaaagacgcgcacaaggcccaggtacagggccttcagggtcaccagttggagaagaggctttcccacaggcccagccttcgccagagccattctctagatagcaaacccacggttaaaagccagtggactctcgaggttccctcctccagcagctgtgctaatcttgaaacagagaggaattctgaccctcttcagccccaggcacccaggagagagattactggatgggatgagaaagccctgaggtccttcagagagttctctggcctgaaaggggcagaggctcctcccaaccagaagggaccaagtggtgtgcaacccaacccagcagaaaccagccccatcagcctagcagagggaaaggagctagggacacacctggggcacagcagtccacagattaggcaaggtggtgttcctgggccagagagcagcaaggagagttcacccagcgtgcaggacagcacttcgcctggagagcaccccgcaaagttacagctaaagagcacagagtgtgggcccccaaaagggaaaaacaggccttcttccctcaacttggaccctgccattcccattgctgacctcttctggtttgagaatgtggcctcatttagttcacctggaatgcaggtctctgagccaggagacccaaaggtcacatggatgacctcatcttactgtaaagcagacccctggagggtttactcccaggacccccaggacctggacattgttgctcatgcactgacaggccgccgtaactcagctcctgtgagtgtgtcagctgtgagaacctccttcatggtcaaaatgtgccaggccagggcggtcccagtcatccctcccaagattcagtacacccagatcccacagcccctgccctctcagagctcaggggagaatggggttcagcctctggagaggagccaggagggacccagctcaaccagtgggaccactcagaaacctgccaaagatgattctccctcctccctggaaagctcaaaggaagaaaaaccaaagcaagatcccggagccattaagtcctcaccagtggatgccactgcaccctgcatgtgcgagggacctaccctttctccagaaccaggctcgtctaacctgctctccacccaggatgcagtagtgcaatgcagaaagcgcatgtcagagacagagccatctggggacaaccttctttcttcaaaactagagcgaccatctgggggttctaagcctttccacaggtcaaggccaggaagacctcagagcctaatcttattcagtcctcctttccccattatggaccacctgcccccttcatccacagtgacagattccaaggtcctgctgtcccctatcagaagtcccacccagacagtttcccctggccttctttgtggagagttggcagaaaacacatgggtcacaccagaaggggttacacttaggaataaaatgaccatccctaagaatggccagagactagagacctcaaccagctgtttttaccagcctcagcggagatcagtaattctggatggaagaagtgggaggcaaatagaatgatttcggttcacctgctggtgtctgaaaaaaaccgtgattcatctggaagttattacagggccagcttgccatattccaggcacacgttatcaagtttgggcctattgtggcctctgacttctctttcttcagccttttgaccacttattaattagtccatttgctagaagagtggtcaagggaaaaacgagagatgaaatttagttaagtctatgtgagcaagtgagagaaggttaggtaaggggagaggatggaatgcttgcctccaatgaactttggagcttgtatgtgagtcagattgctcccctattgctattatctattactcttgagagctggctgtcctttgaaagaaagaagtaatgttctttgaaagaaagaaaaatctcttgctgtgtcaaacctcaaaatgttgctattggggttagaaggcctcctctttatgctttttaatgctctttcaaacgtgttcttttagaccagttttctaataagctttgtaaaatgtactatccaaattagaagcggatttggaaatgcaaactaacgtgcacttagatatccaagtgggtgagcttagccactcttacccatgctctttccctggaatccctggagacctgtccaagatgatttccatataccagcatagaaaatcagaatcaagagcaaactctgagactggcacaatccaagaagatttcctggctctggcttttagtaatttgggactccaactgccactgtactggactgtaatttataaatccagtagctacgcagggtggaggctgggctgaggattaccataatgaaatgtactaaatcttcatttaggtatgcaattgtgaagtgaaggcatctgctttctttacagtatcagagtccaagaacaggatgtcaccatagataaaagcctcatacaaaggcagaactacactccaaatttaatgtgtttaaattggtggggcaccagcagaaaatacttctagctcagctttactcttcttccacactaggctgggcccagcaatacaggagaggatgaagggaggagctccaggaggcgagggaagagccctagcagggcggccatcacaaccactcactgagagttgcccttcttaaaaatgtattttattttagccagtgggtcccttcctttctcctttcctctctactgctcaagaacagatttgaggccaggtgcggtgcctcacatctgtaatcccaacactttgggaggctgagatgggtggattgcttgagcccaggagttcaagaccagcctgggcaacacagcgagaccccatctcttaaaaaataacagacttgaggaacccctctcccttccataattcccctcatccaccgcccactccaggcactcactcaaacttgctcttcaactctgtatacaagcagaagcaataaaccaatctgattttcttttcaattaaaaaaaaaaaaaa

SEQ ID NO: 113 - DNA, 6593 bp, Homo sapiens
  CDS (3200)..(3700)
ttttcgtctatgtttctgatctgctttcaggaagaattattcatttttatcttcccaatctgaatgttttattgaatttttattttccaagttaataaaacctttggttattatcctgtctttgttttacagtgtcctgctcttgatgcgtggatgcagattttgtctctctgtggacgttaatgattgtggtctgaggggaagtcttttctgctccctgtgttgccctcattttctctgagttctctttattttggtggtctcagtctctatctttcacgttgtgaatttttctcaaatatatggtgatcctatggatctgttcatgttttaagagtgaggcatccaaaagctgattggaagttgtgtgtgccaactggtgagcttttccactagggtcaccaggtgggcacctggactcatcattggagaacactgcctgtcagtatttgcacgtgttttctctggggctcattctgtttcttgagagatattcccactactctccttcctgggaaacgggcatacacagggcttttagcctatgctgagtactcatgtggtttcatcaaatgttgtcccactctcggcagaagtccccatgagcacttggcttgatctggccacaggacaccttttgccccttccttcagacatacccagctctgagcttggacaatgctcgaggaacaatgaaaaggctagattttaactcctaattgccctctttagccaagtgcctctgtgcaatgcacaactgtaggaccatatccagagaccctggtctatactcagtgtgcccgagtcctgaccgctgagcaggcagcctcatcacccgtgagtatttagactttcattaagttgcttcaacctttgctgtgcctggtgtccctgagttggagctgctctgatttctccatggagtaggagcacagtggtcatctggctgcatgggaaggacaggggacctcagagccaataaatgccctggtcttcagccccatgtctcaccccatccctcctattccaatccccaagcctctcctggaggccacagggcatctctgctgaccactctgtggcctcccctctgcaggcatgtggttttaggatccccctccctgctcacttttccatcagttccattcctgcataaataggttgctagctcttgcttactgttctcttctgtattctgtgttcatggttgtattaatataactttcattcctctgctcctattttcatggggtttcatgagggaagaaacaggctcatgtgttcagtataccatcttgatccataaaccccatttgagttatctcacaggttgcttagggggcttgctgctctgactggtttgtgaacgtgccctgagtccagctgggactgcagcaacatccatcctgttgagctgtggtctgctaagtgattttgtgtaatgctgtgccaagtgcaggagagggatacatagcatggctaagctctgcttgaatgccatgattagttattaccttccttccttccccctggttttgctgcctattgtcagtaaatgatcttagatctcctgcctccccaaagatatagtctatgtggtggtctgggttctaggttttctttaccacccttgcttcacttaagaaacagaaaactggctaggcacagtagtggctcacacctataatcccagccctttgggaggccaaggcaggaggatcgcttgaggccaggaattcaagaccagcctgcacaacatagcaagactccatctctacaaaaagttaaatttaaattagtggtggcatgcacttatagtcccagctactcgggaggatgaggcaggagaattgtttgagcccatgactttgaggttactgtgagctgtgatcctgctattttactccacctgagtgacagagcgagacgctgtctcaaaaataaagaaacaagtagtccacacaggtgtttgccagcaaacaaacagcgcggattctctgttgaacgtggccaacattgcctcgtcgaagtttgtatcttgccatagttgatgatcaggtggtcggggcttcctggtcagacctgacctttgtggggagatgttctcccaccaaggctcagaagcaggacactcttgctgcccctcgggcagccacccagaacatgggcgtctccatttctgaggttcagcatagttccccccaccctcttcccatgcagtgcatgcctgctctttatcaggatggaacagagggaaggcagaggcactgggggcagcctgtgttgttgatctctgtaagtcacagactgttcgaaaacctcaggaattatgtaagcgttcagtgcctcatttaagagatgaaaaactgaagattagaaagaggaaacgactagtcgccctgctagttgatgacctccagatagccatcttcattcccagttaagtttactacaaaaccacagcctcagctgctgaagctaacctccctacccaccatcgctagggactcagaacaccatggagctcatctctccaacaaaagtcagaattagcaagtacagatgtgtcttacgaaaatgtcagaatccatcatggctgctttggtgaggagctgttctccttccgtggtcatgccattggaaggcagttgtatgacaagaatgctttcacatgagctccgattttcttaactctccagaaggacttcagaagcctctggagttttgagacacggcctctctctcccttctgcttggagacaccttcctgggggtctccactgcattccccgccggtattcctctgtggagccttgcgccctcaggtcccagaaatgggctgtgtgggagcttccagtcagcctggtatctcgggaccttctcagccaggaaatgagactgcacaaagccctgtgaggcccagctgtgttatttctccttccccgacattgcataatcactgctgacacagcatttggggaagatttaacgtcttgggccagcagctgccatctggaaccatcaccacatagcaggttgttctgtcccatccaactgatgagggggctgccctaatgacaaggtccaggacctgggttgggtggtggaaggctgggagctggagtgggcattattgtgcttctgtgctgaaaattgctatggctcttttcccctaacagccagcgtgggagaaccaaacatgagacacaagcatccccttgagctccacagatcttgcgccttgctctcatcaggcatttccttggagaacagcagtcagcagctcatggaagtgagcccggtgcacagactttgcatggactttgcacaggttccatttccatcgtgtgcagacacctgtatctttgggctccacgtgagcacctgccctcttcactctgattttttttttaagagacagcatcttactctgtcaccgaggctggagtacagtggtgtgatcacagctcactgcagcctgaaactcctgggctcaggcaatcctcctgcctcagcctcccgagtggctggtagtacaggtgcatgccaccacgcccacctaatttttttatcttttatagatacaggtctcactgttgctcaggctggtctcgaactcctggcctcaagtgatcctcctgccttggcctaccaaaatgctgggattataggcatgaaccactgtgcctggccttcactctgatttttcttaagagtcctacaggaccttcaggtcttgtcacttctctaccattgtgtgtgagacagggcatggggtgagcttggtcaggtgtgggtcaaaagcctggagactcagagctgctggttccccaagagcccacaaaagttatcagagtttctgagctgagtgttctgcagttgccagaccccacaatgctgggaatactggcttctttgtgtttagaacttgttctgagaaccttgatgagaacacatcaagcaagcagttcctcccagccagggctggagcaacatgccaaaaaacattcttgtctatgggaaaaagacaaccagtattttgtactgtttgaccaagttgtttttaaatatacacatgcctcaacaacccacggcctcaatcgcactgctaatttgtttaaatccctgacactcagatgtcaagaatagcttcatctagcagtgttctctttaaaggaacccttttttttgttttcattttaatcactgccttcttctctgggaggtattgtgggctagagaaagaagtcaggtttgggagtcagccagatttagattggagtcccagctctgtcaccagatctctgggtgatcttggcaaactaacttctgagcttctgtgcattataggcattcagcacatatttgttggatgaaaaatacttttcttgaaagtttatgaagttgtaggatgcccagcagcccccttttctctatttccttcctcttgaagcaagcgttgactatacctctttccctaacccttagtgtaccatagcttcttccaacctctctccaatccattacttttttctgagctaccctgtctcaaatctaactcaggcctttttgcaagaggaagtttaagccattgtttactcattaactcacttgacccttagaacaatcgtgggaggtgtttatttcggaaaggaagctaaagcacaggacagaaaaataaggtcatagcgtgaactagtaagtagcagaactgggaacataggactgttattttcaaacactctaaacttcactgcagttgcaaatttgcaaccaaaatggccgccttgaaagggtcttttgcagtaaaatctcagtgtccaacatcaaagacagttcttcagggcctccaattaactatacatcctgcccccagctgctcatctctgcacctctaacacgtacttcacagagtaggaaattgggctttctccttcaaaaagaaaagtagagaaggcctgagggcagtgtaattaaaatggagaagtagagaccacgaattacttggatgaattcataactggttggtctctgaggcagggattattatttttcctgtattttaagcttaaaagtagtgatttttgcattgttacaaaaaacaaaatagcaaaatatcatttgatacttgtattctgtttgcaatagctaccacttcctttagccccagcaaaaatcaataggtgtgtattctctacaagcccatgctgtgccagaatgccagtattgctaaatgtcatgcaaggatttagacacttttttaaaggaaactctgggagtgcctgttgtctggagagttgacattgtccaaagcaggccaacactggtatgggtatggagaacccacgtcctagctgtggctcacctgcagatgccttgaatttacctctctgggttggaagtgggaagacttcttttaaaagtcctttctaagtttaaaaatccaaaggttacgaaggtagtttttatttatctcaataagtggcctatttgcttaaagcaagtgtacctctgtatatcagcccaaagcttagggcagtgcttcttggctttagtatctgagaaaggtgcctttgggaagagtttggtcagacagaaggtagtctgaatcttaaaggtttcagatgaatgtttgaagtagaacctgggaaatctgcttcctagggctgttagaaggaaattggtctccttaaattacgtcagcatctgaggcagtttcctaagggaatttcttttaaattcaaaagttcaactgcaggaataaatagctgtacaggactagatcttcccatccctcatcttttccccttccccgagtaacgactcaaaaaggcttctgaaattctactcagaatcggagccgtttgcattccaacaaggatcccttaagccaaatgctggtgtgtttgtgtagaatgtccctggggtaggggcggtagctgtggggagggaatgtggtgcaggggacacctgccctctgcccttgaaattgcaccataagatgctgcctatgtcactcacagtggtgctgatactatccgccaaagacaaattgtgaacacggaaaaatggtcgttccctactgtacatcctcaggacagacttaactaaacttggagacaggagattgttcagaccatattgtagtgggtggtgatcattgttttattttgggggagtctggtctattgagcagattgaatgtttccttattgtgcagggcttaattgactatgtctgaaagtttttactgagagctctaagaaaactattgaggaaaatgaaatgttattttgtagtacaaggattatttttgtctatttaggatatacatagctgtagctttgtaaaaaaaaagatctttataaacaatatatgaatgtgccgtcttatttattgattactgtaaattaagatataaatggctatttgcataatttatacctgtgggaattaactggagtatttgttatttgactgttttctattaaggaatattaggcttggtgctatgatgaatgatcttgtaaaatcatgtgtattcttaagaaaatttttgaatataaatttcttgaactgaaaaaaaaaaaaaa

SEQ ID NO: 114 - DNA, 2994 bp, Homo sapiens
  CDS (27)..(908)
tgcgaggctccgcttcttctacaagtatggagaaggcaaaaggcaaggagtggacctccacagagaagtcgagggaagaggatcagcaggcttctaatcaaccaaattcaattgctttgccaggaacatcagcaaagagaaccaaagaaaaaatgtctgtcaaaggcagtaaagtgctctgccctaagaaaaaggcagagcacactgacaaccccagacctcagaagaagataccaatccctccattaccttctaaactgccacctgttaatctgattcaccgggacattctgcgggcctggtgccaacaattgaagctgagctccaaaggccagaaattggatgcatataagcgcctgtgtgcctttgcctacccaaatcaaaaggattttcctagcacagcaaaagaggccaaaatccggaaatcattgcaaaaaaaattaaaggtggaaaagggggaaacgtccctgcaaagttctgagacacatcctcctgaagtggctcttcctcctgtgggggagccgcctgccctggaaaattccactgctctccttgagggagttaatacagttgtggtgacaacttctgccccagaggctttgctggcctcctgggcgagaatttcagccagggcgaggacaccagaggcagtggaatctccacaagaggcctctggtgtcaggtggtgtgtggtccatgggaaaagtctccctgcagacacagatggttgggttcacctgcagtttcatgctggtcaagcctgggttccagaaaagcaagaagggagagtgagtgcactcttcttgcttcctgcctccaattttccacccccgcaccttgaagacaatatgttgtgccccaaatgtgttcacaggaacaaggtcttaataaaaagcctccaatgggaatagaatatcaggaaaaaggccacatctatggtaattaatggcagaaaagctggagagttggattctgcggtgctgctgacaggtgaactctggtcctctgcacctgtttatgggccatgcagactggtggggtggcagatgttagcctaagacccctagcagtgcctgttgctttgtgagtggagatagagactcttacatttaaaaatggaaaaacatttcacaaattaccataaattgtagttaatatgtagaaaaactcattcatactacttttctaaaatagacatgacttcagcagcagcttttttttgttgtattttgagacagtgtctcactgttgcccaggctggagtgcagtggtgcaatctcagttcagtgcaatctccgcctcctgggttcaaatgattctcctgcctcagcctcttgagtagctaggtacaggcacctgccaccacacccagctaattttttgtatttttagtagagatggggtttcaccatgttggccaggttggtctcaaactcctggactcaagtgatcaccctcctcagcctcccaaaatgctgggactatgggcatgagcccctgcgcctgaccttcaacagctcttttaagtgagttcttcagctaagcattgtgatggacttgagtaaaatggtagttggctcttgtgctcaattttctcttcctctgaacactgactactttaggagctgcttcattccaattgcaatttcataaaacgtaaagtattttaaggcaaagaaaggctgttaattccctccctcccccaaacacatgatttttaatattctaaacaatatttttcaaagttctcttaataacctgagatttctatggtttgactccaggatcaaaacacaagggactttgtattatttcacttataattgttttgtatatttctggagtttaaaatgtttaaggttgcttcccgctcataaatacataatatattgaatttaaaatgtgtttattaaccgattctccataaataaaaataagatgtgtatgtaaaataattcatctgttgtatttagagaaccatattcattgcatgcaaatcttattgttagtgttcttaactcaagtaggagtaaaccaaaaagtgtgatttttcttttgtatgactcgtttgttctttattagttggtggtatgggttggatcatttgtttttaaaactacttaggtatgattcacatacaaaaagctgcacatatttaatgtatcctattgtgtaattaatttttaattttttttgtgtacttcctaaacttatagtcctgcgagtctgggaacagatctgtttttcacttatcctgatttaatgacagtttccaacattgttttgttattacaagtaggggatctttttttttgcccgtttaatgaagatactaaaaataatgcactggaaggagtggaagagttggaaaatttgtaaccatcataatacaggtgtaataggtttgggaaagaatcctcaaaaatgttaaagcaagggaggaaagtttgttgagaagcaagatgttcttctctcctgcccgcccccgccgttggttgttggtggtcagaattattgtgtaataaataatagacattttttcttatactatgtgtattgttccttttgtttcctttttaaacttctcccctgctttatttggatgggtcaagtttctgttctgtttccttcctttctattaatttggaaatgtccttggctttacgattctgcttgtagatacttcccctgtttctaacacatttcaataaacttaaatttctctatatacaaaataaattaataattggagtctaccagtaagacagtttatttactcatcttcctgccccagcaagataaaacctaaggttacatacttgccaaatcaccctaattttcacaggcctcccccaaagttcctatcaatcacattcagtcccccactccctgtctccctgctatgctcccagaatgctaagaggaagacagttggagctataaactccctgtgtctcagatgagttccctggcagaggcatgacatcctcgtgc

SEQ ID NO: 115 - DNA, 499 bp, Homo sapiens
  CDS (303)..(446)
gcagggaggagggagagctgctgatggcctgagaggtccaaccgggccctggctgcagagctcaggtggtggggcttgcagggcagggctgtggccagggcaaagagcggccatcacagcttacgcatgactcgaaggtgtttatgaggacctactgtgtgccatgtgcctactgaggcttacacattcaaggcgttatcggaccctgaccagtgctcccaggtgccctgtaacacagtctgctggcctctgggagggcagtctcctaagttctttatggggtctgagcagggattgcagggatgatgcctccaggagaccaaggtggaccaggagctcctgccttctgtgagaaccaccttgggcagtctttccgaggtggtggcaagagcctggggcccagcctcccagggtcccctctccaaggccatggctttactaacatgtaaagtgaccaaggcctttgtagtgtctgagtgcaggcaccacaggcctgtgt

SEQ ID NO: 116 - DNA, 1113 bp, Homo sapiens
  CDS (35)..(505)
ccgggccgtcgtgggctccggcttgcgtgcggagatgagcgggtccctcggccgagctgcggcggctctgctccgctgggggcgcggcgcgggcggcggtggcctttggggtccgggcgtgcgggcggcgggctcgggcgcgggcggcggcggctcggcggagcagttggacgcgctggtgaagaaggacaaggtggtggtcttcctcaaggggacgccggagcagccccagtgcggcttcagcaacgccgtggtgcagatcctgcggctgcacggcgtccgcgattacgcggcctacaacgtgctggacgacccggagctccgacaaggcattaaagactattccaactggcccaccatcccgcaagtgtacctcaatggcgagtttgtagggggctgtgacattcttctgcagatgcaccagaatggggacttggtggaagaactgaaaaagctggggatccactccgcccttttagatgaaaagaaagaccaagactccaagtgagggcggccaagtcctcgctgagcagagagggagccgttcatgtcagagactcactgccagaaaagccttacccattttggttttcactattgagaccgcaactgcttgcactgatcattttggttcgtgagcagttggtgattttagttggtctggtgttcgggctaagaatattttattgtggacttaattacaaccactgcactgtaatgattcaatgctgtattatgatattgctgtaaacaaaattcattcttatattgtcacttattctttgcctgattcagaagttaaataggagctttggaatcattattcatgacccctctgcaaatgtgtcagtctccaaagagagtatctccccccaaattttgtgtagcttcttttgttatggaaaatggtggacaaaaaaagaaactgtgataactggggcgttgttttttaaaataaactccagcacagggatgctgtgcatgcctgagttgattccgaagtgcatatgtctgtaaggatttggagtgcctgcagtgttttatgtgtgggaagtaagggtgagtctcatattcttctattaaatttgccacaagaattgcaaaaaaaaaaaa

SEQ ID NO: 117 - DNA, 3528 bp, Homo sapiens
  CDS (213)..(3203)
gttgactgtgacacgggtgttacatatcttcctgtgccccttctccctgtagggtgaagctctgggcctcggcttttggtggggagataaaatccattgctgctaagtactccggttcccagcttctgcaaaagaaatacaaagagtatgagaaagacgttgccatagaagaaatcgatggcctccaactggtaaagaagctggcaaagaacatggaagagatgtttcacaagaagtctgaggccgtcaggcgtctggtggaggctgcagaagaagcacacctgaaacatgaatttgatgcagacttacagtatgaatacttcaatgctgtgctgataaatgaaagggacaaagacgggaattttttggagctgggaaaggaattcatcttagccccaaatgaccattttaataatttgcctgtgaacatcagtctaagtgacgtccaagtaccaacgaacatgtacaacaaagaccctgcaattgtcaatggggtttattggtctgaatctctaaacaaagtttttgtagataactttgaccgtgacccatctctcatatggcagtactttggaagtgcaaagggcttttttaggcagtatccggggattaaatgggaaccagatgagaatggagtcattgccttcgactgcaggaaccgaaaatggtacatccaggcagcaacttctccgaaagacgtggtcattttagttgacgtcagtggcagcatgaaaggactccgtctgactatcgcgaagcaaacagtctcatccattttggatacacttggggatgatgacttcttcaacataattgcttataatgaggagcttcactatgtggaaccttgcctgaatggaactttggtgcaagccgacaggacaaacaaagagcacttcagggagcatctggacaaacttttcgccaaaggaattggaatgttggatatagctctgaatgaggccttcaacattctgagtgatttcaaccacacgggacaaggaagtatctgcagtcaggccatcatgctcataactgatggggcggtggacacctatgatacaatctttgcaaaatacaattggccagatcgaaaggttcgcatcttcacatacctcattggacgagaggctgcgtttgcagacaatctaaagtggatggcctgtgccaacaaaggattttttacccaaatctccaccttggctgatgtgcaggagaatgtcatggaataccttcacgtgcttagccggcccaaagtcatcgaccaggagcatgatgtggtgtggaccgaagcttacattgacagcactctccctcaggcacaaaagctgactgatgatcagggccccgtcctgatgaccactgtagccatgcctgtgtttagtaagcagaacgaaaccagatcgaagggcattcttctgggagtggttggcacagatgtcccagtgaaagaacttctgaagaccatccccaaatacaagttagggattcacggttatgcctttgcaatcacaaataatggatatatcctgacgcatccggaactcaggctgctgtacgaagaaggaaaaaagcgaaggaaacctaactatagtagcgttgacctctctgaggtggagtgggaagaccgagatgacgtgttgagaaatgctatggtgaatcgaaagacggggaagttttccatggaggtgaagaagacagtggacaaagggaaacgggttttggtgatgacaaatgactactattatacagacatcaagggtactcctttcagtttaggtgtggcgctttccagaggtcatgggaaatatttcttccgagggaatgtaaccatcgaagaaggcctgcatgacttagaacatcccgatgtgtccttggcagatgaatggtcctactgcaacactgacctacaccctgagcaccgccatctgtctcagttagaagcgattaagctctacctaaaaggcaaagaacctctgctccagtgtgataaagaattgatccaagaagtcctttttgacgcggtggtgagtgcccccattgaagcgtattggaccagcctggccctcaacaaatctgaaaattctgacaagggcgtggaggttgccttcctcggcactcgcacgggcctctccagaatcaacctgtttgtcggggctgagcagctcaccaatcaggacttcctgaaagctggtgacaaggagaacatttttaacgcagaccatttccctctctggtaccgaagagccgctgagcagattccagggagcttcgtctactcgatcccattcagcactggaccagtcaataaaagcaatgtggtgacagcaagtacatccatccagctcctggatgaacggaaatctcctgtggtggcagctgtaggcattcagatgaaacttgaatttttccaaaggaagttctggactgccagcagacagtgtgcttccctggatggcaaatgctccatcagctgtgatgatgagactgtgaattgttacctcatagacaataatggatttattttggtgtctgaagactacacacagactggagacttttttggtgagatcgagggagctgtgatgaacaaattgctaacaatgggctcctttaaaagaattaccctttatgactaccaagccatgtgtagagccaacaaggaaagcagcgatggcgcccatggcctcctggatccttataatgccttcctctctgcagtaaaatggatcatgacagaacttgtcttgttcctggtggaatttaacctctgcagttggtggcactccgatatgacagctaaagcccagaaattgaaacagaccctggagccttgtgatactgaatatccagcattcgtctctgagcgcaccatcaaggagactacagggaatattgcttgtgaagactgctccaagtcctttgtcatccagcaaatcccaagcagcaacctgttcatggtggtggtggacagcagctgcctctgtgaatctgtggcccccatcaccatggcacccattgaaatcaggtataatgaatcccttaagtgtgaacgtctaaaggcccagaagatcagaaggcgcccagaatcttgtcatggcttccatcctgaggagaatgcaagggagtgtgggggtgcgccgagtctccaagcccagacagtcctccttctgctccctctgcttttgatgctcttctcaaggtgacactgactgagatgttctcttggcatgctaaatcatggataaactgtgaaccaaaatatggtgcaacatacgagacatgaatatagtccaaccatcagcatctcatcatgattttaaactgtgcgtgatataaactcttaaagatatgttgacaaaaagttatctttttactttgccagtcatgcaaatgtgagtttgccacatgataatcacccttcatcagaaatgggaccgcaagtggtaggcagtgtcccttctgcttgaaacctattgaaaccaatttaaaactgtgtactttttaaataaagtatattaaaatcat

SEQ ID NO: 118 - DNA, 1957 bp, Homo sapiens
  CDS (124)..(1470)
gagatgggttggctgcagtagtgagaggctgggggtgcggctctttccctgcagtcctgccgaggaagcgtgcgtccctggcgcttccttcttctcttccggcggagagcttgggatgtggtaatgccagccacactcctcagagccgtggccagatctcatcatatattatcaaaagcacatcagtgccgaagaatcggtcatctaatgttaaaaccacttaaggaatttgaaaatacaacatgcagcacactgacaatacgtcaaagcttggatttgttccttcctgataaaacagctagtggtttgaataagtctcagatcctggaaatgaaccaaaaaaagtcagataccagcatgctgtctccattaaatgctgctcgttgccaagatgaaaaggcacaccttccaaccatgaaatcctttggtactcacaggagagtgacccacaaaccaaatctgttgggttctaaatggtttataaaaatattaaagaggcatttctcatctgtatcaacggaaacatttgttccaaaacaagacttcccacaggtgaagagaccactaaaagcatccaggaccagacagccatccaggaccaaccttccagttctgtctgtgaacgaggacccaatgcactgcacagcatttgcaacggcagatgagtatcatctgggaaatctgtctcaagatctggcctcccacggatatgttgaagtaacaagcttgcctagagatgcagcaaatattttggtgatgggtgtggaaaattctgcaaaagaaggtgatcctggaacaatattcttcttcagggaaggagctgctgtgttttggaatgtgaaagacaaaactatgaagcatgtgatgaaagttctagaaaaacatgaaattcagccctatgaaatcgcactggtacactgggaaaatgaagaacttaactacataaaaatagagggacagtcaaaacttcacaggggggaaatcaagttaaattcagagctggatttagatgatgccattctagagaagtttgctttctccaatgctctatgcctttctgtaaaactggcaatttgggaagcatcactggataaatttattgaatctattcagtcaattcctgaggctttaaaagctgggaagaaagtgaaactatctcatgaagaagttatgcagaaaatcggtgaactctttgctctaaggcaccgtataaacttgagttcagacttcctgattactcctgatttctactgggacagagaaaacctggaaggactttacgataaaacgtgtcaattccttagcattggccgaagagttaaggtcatgaatgaaaaacttcagcactgcatggaactaacagatctaatgcggaatcacctgaatgagaagagggcactccgcttggagtggatgattgtcatcctcattaccatagaggtaatgtttgagctgggacgagtatttttctgatcaagtgataaccaaagtgtcactgcaagagatattcaagttctacaatcaaaaattaaatgttcggcccggcgcggtgcctcatgcctgtaatcccagcactttcggaggccaagaagggtggcttgagatgagatcaggagctcaagacaagcctggccaacatggtgaaaccccatctctactaaaaataccaaaattagccaggtgtgttggcacacgcccgtcatctcagctactcaggaggctgaggcaggagaatctcttgaacttgggaggcggaggttgcagtgagctaagatcacaccactgcactccagccagggcaacagtgagactcagtctcaaaaataaacaataaaataaataaataaatgttcactactgggtgatcatttaataggtgtttttttaatcaagaaattatctttttcagcccagtatatcgtgtgaataaaattatgaagaatctaaaaaaaaaaaa

SEQ ID NO: 119 - DNA, 2665 bp, Homo sapiens
  CDS (95)..(2608)
gcacgagctgggccggcagcggttgtgaggagttagctcgcggcattgcaggctctgagaggaggggacccggttcccgggtgagtgtccaggcatgccagcggaacggcccgcgggcagcggcggctcggaggctccagcaatggttgaacaactggacactgctgtgattaccccggccatgctagaagaggaagaacagcttgaagctgctggactagagagagagcggaagatgctggaaaaggctcgcatgtcttgggatagagagtcgacagaaattcggtaccgtagacttcaacatttgcttgaaaaaagcaatatctactccaaatttttattgacgaaaatggaacagcaacaattagaggaacagaagaagaaagaaaaattggagagaaaaaaggagtctttaaaagttaaaaagggtaaaaattcaattgatgcaagtgaagagaagccagttatgaggaaaaaaagaggaagagaagatgaatcatacaatatttcagaggtcatgtcaaaagaggaaattttgtctgtggctaaaaaaaataaaaaggagaatgaggatgaaaactcctcctctactaatctctgtgtggaagatcttcagaaaaataaagattcgaatagtataattaaagatagattgtctgaaacggttaggcagaatactaaattcttttttgacccagtccggaagtgtaatggtcagccagtaccttttcaacaaccaaagcacttcactggaggagtgatgcgatggtaccaagtagaaggcatggaatggcttaggatgctttgggaaaatggaattaatggcattttagcagatgaaatgggattgggtaagacagttcagtgcattgctactattgcattgatgattcagagaggagtaccaggaccttttcttgtctgtggccctttgtctacacttcctaactggatggctgaattcaaaagatttacaccagatatccctacaatgttatatcatggaacccaggaggaacgtcaaaaattggtaagaaatatttacaaacggaaagggactttgcagattcatcctgtggtaatcacgtcatttgaaatagccatgagagaccgaaatgcgttacagcattgctattggaaatacttaatagtagatgaaggacacaggattaagaatatgaagtgccgtctaatcagggagttaaaacgattcaatgctgataacaaacttcttttgactggtactcccttgcaaaacaatttatcagaactttggtcattgctaaactttttgttgccagatgtatttgatgacttgaaaagctttgagtcttggtttgacatcactagtctttctgaaactgctgaagatattattgctaaagaaagagaacagaatgtattgcatatgctgcaccagattttaacacctttcttattgagaagactgaagtctgatgttgctcttgaagttcctcctaaacgagaagtagtcgtttatgctccactttcaaagaagcaggagatcttttatacagccattgtgaaccgtacaattgcaaacatgtatggatccagtgagaaagaaacaattgagttaagtcctactggtagaccaaaacgacgaactagaaaatcaataaataacagcaaaatagatgaattccctaatgaattggaaaaactgatcagtcaaatacagccagaggtggaccgagaaagagctgttgtggaagtgaatatccctgtagaatctgaagttaatctgaagctgcagaatataatgatgctacttcgtaaatgttgtaatcatccatatttgattgaatatcctatagaccctgttacacaagaatttaagatcgatgaagaattggtaacaaattctgggaagttcttgattttggatcgaatgctgccagaactaaaaaaaagaggtcacaaggtgctgcttttttcacaaatgacaagcatgttggacattttgatggattactgccatctcagagatttcaacttcagcaggcttgatgggtccatgtcttactcagagagagaaaaaaacatgcacagcttcaacacggatccagaggtgtttatcttcttagtgagtacacgagctggtggcctgggcattaatctgactgcagcagatacagttatcatttatgatagtgattggaacccccagtcggatcttcaggcccaggatagatgtcatagaattggtcagacaaagccagttgttgtttatcgccttgttacagcaaatactatcgatcagaaaattgtggaaagagcagctgctaaaaggaaactggaaaagttgatcatccataaaaatcatttcaaaggtggtcagtctggattaaatctgtctaagaatttcttagatcctaaggaattaatggaattattaaaatctagagattatgaaagggaaataaaaggatcaagagagaaggtcattagtgataaagatctagagttgttgttagatcgaagtgatcttattgatcaaatgaatgcttcaggaccaattaaagagaagatggggatattcaagatattagaaaattctgaagattccagtcctgaatgtttgttttaaagtggagctcaagaatagcttttaaaagttcttatttacatctagtgatttccc

SEQ ID NO: 120 - DNA, 2274 bp, Homo sapiens
  CDS (1016)..(2221)
cactaggtgatttactcttagctgattcgaaatcagaaacataatcagcaaggactggggaacctcccacagtactttctctcgctgctgttttctccacccacacaagtccaccacttttaaaagcatttcttccatctcgctggccacatcttcgtggatgacagcgctgccactgtgcttcagaatcctctatctctcccagatctttcctggtgtttctctcagggtcagtggcatctaatctttgtgactctactcctggtttgagtcctcggttaacagccttggggaaactgtaacataaactgcaacgctgttggtgccgtttcttcttagacagggtggcagcgatcgcctccccccgcagccggccttccactgcgccagcaagaccccctcccaccaaaacgccgagggctcccagagcgcaggcgccccgggccccgcccctttccgaagactcggctcctattggcccaggggccggggttggaacgccgaagggagttgctcctaggtcttgtccgtgccgggttcgcttttctttccttcccgaagcctggcccttagatctactatcgcagagtctgcggccgccaggaagcccagattcgagtgtccggagagtaaccggaagtgctgtccccaggcctaggggcggcgccggcggctgccagggagaggcaagaattgagtgttgtgaatagttctgaactagagaccttttgaaaccaaaaggaagatggtcttgagtctttcttgttacgaatgctatcttctttgagaagtcaaattgtcaggatcaggaatgtatgttttcttccatctggattctagggttggaaataccaagtaaggaattaacatatatgatgctggaaacttgtagaggctcatgattgaaaggcctgaaacagatgtatcttccaagttcttatcaagaaaatgactgtgagggcaacgatgggtcaagaagaccagcggaaaactccctaggagagagccatagaaaatgtacacttcagaagagaaatgtaatcagagaactcaaaaaaggaaaatatataatgtatgccctcggaagggtaaaaagatttttattcatatgcatgagattattcagatagatggtcatatataccagtgccttgaatgcaagcaaaacttctgtgaaaacttagctcttattatgtgtgagagaacccatactggggagaaaccttataaatgtgatatgtgtgagaaaacctttgtccaaagctcagatcttacttcacaccagaggatccacaattacgagaaaccttataaatgtagcaaatgtgagaagagcttttggcatcacttagcgctttcaggacatcagagaacacatgcaggtaaaaaattctatacatgtgacatttgtggcaagaattttggtcagagttctgatctgcttgtccaccagcgaagccatactggcgagaaaccatatctatgtagtgagtgtgacaaatgcttcagtagaagtacaaacctcataaggcatcgaagaactcacacaggtgagaaaccatttaagtgtctcgagtgtgaaaaagcttttagtgggaaatcagatcttattagccaccagagaactcacactggggaaaggccctacaaatgtaataagtgtgagaaaagttaccgacaccgttcagccttcattgtacataaaagagttcatactggggagaagccctataagtgtggtgcctgtgaaaaatgctttggccagaaatcagaccttatcgtgcaccagagagtccacacaggtgagaagccgtataaatgcctggaatgtatgagaagttttactcggagtgccaacctaattaggcaccaggcaactcacactcacacttttaaatgccttgaatatgaaaaaagctttaactgtagctcagatcttattgtacatcagagaattcacatggaagagaaaccacatcagtggtctgcgtgtgagagtggcttcctcctaggaatggactttgttgcccaacagaaaatgagaactcaaacagaggagctacactataaatacactgtatgtgataaaagcttccaccagagttcagcccttcttcaacatcagacagtacacattggtgaaaaaccgtttgtctgtaatgtgagtgaaaaaggtcttgagcttagccctccccatgcgtcagaagcctcacagatgtcttgaccaggcgagaagctgtaataccaatattaaaaattatttatgtatcagag

SEQ ID NO: 121 - DNA, 2126 bp, Homo sapiens
  CDS (90)..(1826)
ataaatgctacaaatgtgtggtaaagcagggacataccttatttgttcctacagggtggatccatgctgtgctcacttctcaggactgtatggcttttggggggaacttcctgcacaaccttaacattggcatgcagctcaggtgttatgagatggagaaaaggctaaaaacaccagatcttttcaaattccctttctttgaagccatatgttggtttgtagccaaaaacttgctggaaaccctgaaagaactgagagaagatggtttccagcctcaaacttacctagtacagggagtgaaagcactgcatactgctttaaaattatggatgaaaaaagaacttgtatctgaacatgcctttgaaattccagacaatgttagacctggacaccttattaaagaactttctaaagtaattcgagcaatagaggaggaaaacggcaaaccagttaaatctcagggaattcctattgtgtgtccagtttcacgatcctcaaatgaagcaacttccccataccattcccgaagaaagatgaggaaacttcgagatcataatgtccgaactccttctaacctagacatcctagagctccacacaagggaggtcctcaaacgattagagatgtgtccatgggaagaggacatcttgagctctaaactgaatggaaaattcaacaaacatctccaaccatcctccacagtacctgaatggagagcgaaagataatgatctacgattactgctgacaaatggaagaataattaaagatgaaaggcagccctttgcagatcaaagtctttatacagcagatagtgaaaatgaagaggataaaagaaggacaaaaaaggcaaaaatgaagatagaagagagttcaggagtagagggagtggaacatgaagaatctcaaaaaccactgaatgggttttttacacgtgtgaaatcagaactcaggagtagatcatcaggatattctgatatttctgagtcagaagactccggacccgagtgcactgcactgaaaagtatctttaccactgaagagtctgaaagttcaggtgatgaaaagaaacaagaaataacatccaactttaaggaggaatctaatgtgatgaggaacttccttcaaaagagccagaagccatctagaagtgaaattccaattaaaagggaatgtcctacctcgacgagcacagaggaagaagctattcagggcatgctgtctatggcagggttgcactattccacgtgtttacaaaggcaaatacaaagcacagactgcagtggtgaaagaaactctctccaggatcccagcagctgccatggcagtaaccatgaggttaggcagttgtatcgctatgataaaccagtggaatgtggataccatgtcaagactgaagatccagacttgaggacttcctcctggattaaacagtttgatacttccagatttcatcctcaggatctaagtagaagccagaaatgcatcagaaaggaaggttcatcagaaattagtcagagggtacaaagtaggaattatgtggacagcagcggctcaagccttcagaatggaaagtatatgcagaattcaaacctgacttcgggggcgtgccagataagtaatggcagtctaagcccagaaaggccagttggtgaaacttccttctcggtgccccttcaccccaccaagagaccggcatcaaatccaccacctatcagcaaccaggcaacaaaaggtaaacgtccaaaaaaaggaatggcaacagccaaacaacgtcttgggaagatccttaagttgaacagaaatggccatgcacgtttctttgtgtgacagagctgctgttgcagccattcttccctttggagaccagtctaggggtgcaggagcctggagcttccgctgtccccctgcctggagcagtttgtgtgtatagtaagaacactgcccgaagaacagaatgaacctgatgctgcattttcactgtgccacacccactcagcaataaccattttggacctggtgggggagaggaagaaggagggtagaaccttaaaaagagaccttgaactggaaagggtctcttgtcagggcttgaattttattttgttggtggtagtgtcttgatgt

SEQ ID NO: 122 - DNA, 2298 bp, Homo sapiens
  CDS (96)..(1784)
tttcgtcggccgcgtccccgccggccctgcagacgtggtggggcgggacccgctgggcactcccgcgcgtactcggccgcctgagcgatactaaaatgtctgatgatgctggtgacaccttagccactggagacaaagcagaagttactgagatgcctaatagtgattctttacctgaggatgcagaagtgcattgtgattcagctgcagtttcacatgagccaacaccagctgaccccagaggggaggggcatgaaaatgcagctgtgcagggtgcaggggctgccgccattgggccccctgtgcagcctcaggatgccaacgccctggagccccctctcaatggagacgtgactgaggatacacttgctgaatgtattgattccgtcagccttgaggcagaacccagatccgaaatacccctgcaagaacagaattatctggctgtggattcccctccaagtggaggaggatgggcaggctggggatcctggggcaaatctctgctgtcgtcagcatctgccacagtaggtcatggattgacggcagtcaaggaaaaagcaggagccactctacggattcatggtgtaaattctggatcttctgaaggagcccaaccaaatactgaaaacggagtccctgaaataacagatgcagccacagatcagggccctgcagaaagcccacccacttccccttcatcagcctctcggggtatgctgtctgccatcaccaatgtggttcaaaacacaggtaaaagtgtcttaactggaggccttgatgcgttggaattcatcggcaagaaaaccatgaatgtccttgcagaaagtgacccgggctttaagcggaccaagacgctcatggagagaactgtttccttgtctcagatgttaagggaagctaaggagaaggagaagcagagactggcacagcagctcacgatggagagaaccgcgcactacgggatgctgtttgatgaatatcaaggcttgtcacacctggaagccctggaaattctgtccaatgaaagcgaaagcaaggttcagtcatttttagcatcacttgatggagagaagctggaactcttaaaaaatgacctaatttccattaaagacatctttgcagccaaagaattagagaatgaagaaaatcaagaagaacaaggcttagaagaaaagggagaagaatttgctcgcatgcttacagagcttctctttgaattacatgtggcggccacacctgacaaactcaataaggccatgaagagggctcatgactgggtggaagaggatcaaaccgtggtgtcagtagatgtggcaaaagtgtccgaagaagaaacaaagaaggaagaaaaggaagagaaatctcaagaccctcaagaagacaaaaaggaggaaaagaaaactaagaccatagaggaagtatacatgtcgtccattgaaagtctggcggaggtaacagcgcgctgtattgagcagcttcataaagtagcagaattaattcttcatggacaagaagaggaaaaaccagctcaggaccaagcaaaagttctaataaaattaactactgcaatgtgcaatgaagtggcctctttatcaaagaagtttacgaattctttaaccactgttgggagcaacaagaaggccgaggtccttaaccccatgatcagtagtgtattgttagagggctgcaacagtacaacgtacatacaggatgccttccagctgctgctgcctgttctgcaggtctcacatatccagaccagttgtttgaaagcacagccgtgacctggccagactccatctagttaaaggagacagctggccgccttgcctcaatatgtaccatttaaggggatgttctctgtgcgcctggccacagacatccatttgaggacactacaagcaattttgcacagacaatattgagaatgcaaatttagagagagttatcatttctctcaatgtgtataattgtttttacaaacaattgtgttttctttatgttaatttaaacttacacagcttatattgaaaatttcctttcatctgaaatttatttacaaatattcctgttcattttcctggttaagcatgctatatttagaaactcatggggagaccttagacttttgtttaatcctttatgtttcaacctttaaatgttccattcttatagtattactttaaatcaattctaaaactgaactttgttttgttacataaatgtcgcaggcaaaaataacactacttatagattttacctattatggtaaaaaataggaacatattgtcattc

SEQ ID NO: 123 - DNA, 546 bp, Homo sapiens
  CDS (216)..(443)
ccttaatctagcagtaatttatcaaaaacccatatgataagagaattattttataatagtgttggtaaagaaaatctaaaatagaaaaaacatgccaacaattgattggctaatgaggtgggtgatgccagatgcaagactgctgggcctaccacaggagcaagagagaagccatgcattccatctcaaggcatctgtgagcccatgtagacaccatgagcaaagctcaccctcctgagttgaaaaaatttatagacaagaagttatcattgaaattaaatggtggcagacatgtccaaggaatattgtggggatttgatcccttaatgaatcttgtgatagataagtgtgtggagatggcaaccagcgggcaacagaagaatattggaatggtggtgatacgaagaaatagtatcatcatgttagaaaccttggaacaagaataaataatggctgttcagcagagaaattccacgtcccctctccaaagagcctgttttactatgatgtaaaaattaggtcatgtacatttttatgttggacttt

SEQ ID NO: 124 - DNA, 3107 bp, Homo sapiens
  CDS (16)..(2847)
gtcaacttggtggtgatgctggccgagttgttcatgtgttttgaggtgctcaagcccgactttgtgcaagtgaaggacttgcccgatggtcacgctgcctccccccggggcactgaggcctccccacctcagaacaacagcggcagtagttctcctgtcttcaccttccgccacccgcttctgtcatctggtggcccccagtccccactccgaggatccacaggctccctgaagtcttccccgtccatgtcccatatggaggccctgggcaaggcctggaaccggcagctcagccgtcccctctcccaggctgtgtcattcagcaccccctttggcctggacagcgacgtggatgtcgtcatgggagaccctgtgctcctccgctctgtgagctcggacagcctgggccccccgcgtcccgcgccggccaggacccccacccagccacccccggagcctggtgacctgcccaccatcgaggaagctctgcagatcatccacagtgccgagccccggctcctcccagatggggcggccgacggcagcttctacctccactcccctgaggggccctccaagccatccctggcctccccctacctgcccgaggggacctccaaaccactgtccgacaggcccaccaaagcaccagtgtacatgccacaccccgagaccccctcgaaaccatctccctgtctggtgggggaggcatcgaaaccgccagccccatccgaggggtccccgaaggcggtggcttcgtccccagcagccaccaactccgaggtgaaaatgaccagctttgcagaacgcaagaaacagctggtgaaggcagaggctgaggccggagcggggtcccccacgtccactccggccccgccggaggccctgagctcggagatgagtgagctcagcgcccggctggaggagaaacgcagagccatcgaggctcagaagcgacggattgaggccatattcgccaagcaccgccagcggctgggcaaaagcgccttcctgcaggtgcagccgcgggaagcctctggggaggcggaagcagaggcggaggaggccgattccggtccagtccctggtggggagcggcccgcaggcgagggccagggtgagccaacctcacggcccaaggcagtgaccttctcgccagacctgggcccggtgccccacgaggggctgggggaatacaatcgagcggtcagcaagctgagtgccgccttgagctcgctgcagcgggacatgcagaggctcacggaccagcagcagcggctcctggccccgcccgaggcccccggatccgccccaccacctgctgcgtgggtcatccctggccccacgacggggcccaaagctgcatcccccagccccgcccggcgagtcccggccacccggcgcagccctgggcccgggcccagccagtcaccccgcagcccgaaacacacgcggccagcggagctgcggctggcacccttgaccagggtgcttacgccaccccacgacgtagacagcctcccccacctgcgcaagttctcgccgagccaggtgcccgtgcagacgcgctcttccatcctcctggcggaggagacgccccccgaggagccagccgcccggccgggcctcatcgagatcccgctgggcagcctggcagatcccgccgccgaggacgagggagacgggagccccgctggtgctgaggattccttggaggaggaggcgtcttcggagggggagccccgggtggggctggggttcttctacaaggatgaagacaagcctgaggacgagatggcccaaaagcgggccagcctgctggagcggcagcagcggcgagcagaggaggcgcggcggcgcaagcagtggcaggaggtggagaaggaacagcggagggaggaggccgcgaggctggcccaagaggaggccccgggcccagccccgcttgtgtccgcagtcccgatggcgactccagcccctgctgcccgggctccagccgaggaggaggtgggcccccggaagggggacttcacgcggcaggagtacgagcgccgggcccagctgaagctgatggacgacctcgataaggtgctgcggccccgggctgcggggtccgggggtccaggtcggggcgggcggagggccacccggcctcgctcgggttgctgtgacgactcagccctggcacgaagcccagcccgcggcctgctgggctctcggctgagcaaaatctattcccagtccaccctgtcactgtccactgtggccaacgaggcccacaataacctcggggtgaagaggcccacgtctcgggctccctccccgtcaggtctcatgtccccaagccgcctgcctggaagccgcgaacgggactgggaaaatggcagcaatgcctcctccccagcgtcagtgcccgagtacacaggtccacggctgtacaaagaacccagcgccaagtccaacaagttcatcatccacaatgccctatcacactgctgcctggcgggcaaggtgaacgaaccgcagaagaatcgcattctggaggaaattgagaaaagcaaggccaaccacttcctgatcctctttcgcgactcgagctgccagttccgggcgctctacacgctgtcgggggagacagaggagctgtcgcggctggcagggtatgggccccggaccgtcacgcccgccatggtggaaggcatctacaagtacaactcggaccgcaagcgcttcacccagatccccgccaagaccatgtccatgagcgtcgatgccttcaccatccagggacacctctggcagggcaagaaacccaccactcccaagaagggcggcggcacccccaaatagccccacccgggcggtccacgggccgggccctgtgtgctgcggccgccatcccctggaggacagtcagtcggtattcctgggtcctgtctgtccccaaccgtgtctgggtggggctggagtctccaccctctgactttgagtccagtcctgctgtgggggctgagctgggaggttcagggactcagggctcagctcagtccccttgtctgtcctcccccacttcttgaataaaataatttaaagagaaaaaaaaaaaa

SEQ ID NO: 125 - DNA, 5559 bp, Homo sapiens
  CDS (1)..(3636)
atggcgttaatgtttacaggacatttactattcttagcattattgatgtttgctttctctacttttgaggaatctgtgagcaattattccgaatgggcagttttcacagatgatatagatcagtttaaaacacagaaagtgcaagatttcagacccaaccaaaagctgaagaaaagtatgcttcatccaagtttatattttgatgctggagaaatccaagcaatgagacaaaagtctcgtgcaagccatttgcatctttttagagctatcagaagtgcagtgacagttatgctgtccaacccaacatactacctacctccaccaaagcatgctgattttgctgccaagtggaatgaaatttatggtaacaatctgcctcctttagcattgtactgtttgttatgcccagaagacaaagttgcctttgaatttgtcttggaatatatggacaggatggttggctacaaagactggctagtagagaatgcaccaggagatgaggttccaattggccattccttaacaggttttgccactgcctttgactttttatataacttattagataatcatcgaagacaaaaatacctggaaaaaatatgggttattactgaggaaatgtacgagtattccaaggtccgctcatggggcaaacagcttctccataaccaccaagccactaatatgatagcattactcacaggggccttggtgactggagtagataaaggatctaaagcaaatatatggaaacaggctgtagtggatgtcatggaaaagacaatgtttctattgaatcatattgttgatggttctttggatgaaggtgtggcctatggaagctacacagctaaatccgtcacacagtatgtttttctggcccagcgccattttaatatcaacaacttggataataactggttaaagatgcacttttggttctattatgccacccttttacctggcttccaaagaactgtgggtatagcagattccaattataattggttttatggtccagaaagccagctagttttcttggataagttcatcttaaagaatggagctggaaattggttagctcagcaaattagaaagcaccgacctaaagatggaccgatggttccttcaactgcccaaaggtggagtactcttcacactgaatacatctggtatgatccccagctcacaccacagccacctgctgattatggtactgcaaaaatacacacattccctaactggggtgtggttacttatggggctgggttgccaaacacacagaccaacacctttgtgtcttttaaatctgggaagctggggggacgagctgtgtatgacatagttcattttcagccatattcctggattgatgggtggagaagttttaacccaggacatgagcatccagatcagaactcatttacttttgcccccaatggacaagtatttgtttctgaagctctctatggacccaagttgagccaccttaacaatgtattggtgtttgctccatcaccctcaagccagtgtaataagccctgggaaggtcaactgggagaatgtgcgcagtggcttaagtggactggcgaggaggttggtgatgcagctggggaaataatcactgcctctcaacatggggaaatggtatttgtgagtggggaagccgtgtctgcttattcttcagcaatgagactgaaaagtgtatatcgtgctttgcttctcttaaattcccaaactctgctagttgttgatcatattgagaggcaagaagattccccaataaattctgtcagtgccttctttcataatttggatattgattttaaatatatcccatataagtttatgaataggtataatggtgccatgatggatgtgtgggatgcacattacaaaatgttttggtttgatcatcatggcaatagtcccatggccagtatacaggaagcagagcaagctgctgaatttaaaaaacgatggactcaatttgttaatgttacttttcagatggaacccacaatcacaagaattgcatatgtcttttatgggccatatatcaatgtctccagctgcagatttattgatagttccaatcctggacttcagatttctctcaatgtcaataatactgaacatgttgtttctattgtaactgattaccataacctgaagacaagattcaattatctgggattcggtggctttgccagtgtggctgatcaaggccaaataacccgatttggtttgggcactcaagcaatagtaaagcctgtaagacatgataggattattttcccctttggatttaaatttaatatagcagttggattaattttgtgcattagcttggtgattttaactttccaatggcgtttttacctttcttttagaaaactaatgcgatggatattaatacttgttattgccttgtggtttattgagcttttggatgtgtggagcacttgtagtcagcccatttgtgcaaaatggacaaggacagaggctgagggaagcaagaagtctttgtcttctgaagggcaccacatggatcttcctgatgttgtcattacctcacttcctggttcaggagctgaaattctcaaacaactttttttcaacagtagtgattttctctacatcagggttcctacagcctacattgatattcctgaaactgagttggaaatcgactcatttgtagatgcttgtgaatggaaggtgtcagatatccgcagtgggcattttcgtttactccgaggctggttgcagtctttagtccaggacacaaaattacatttgcaaaacatccatctgcatgaacccaataggggtaaactggcccaatattttgcaatgaataaggacaaaaaaagaaaatttaaaaggagagagtctttgccagaacaaagaagtcaaatgaaaggcgcctttgatagagatgctgaatatattagggctttgaggagacacctggtttactatccaagtgcacgtcctgtgctcagtttaagcagtggaagctggacgttaaagcttcatttttttcaggaagttttaggagcttcgatgagggcattgtacatagtaagagaccctcgggcatggatttattcaatgttgtacaatagtaaaccaagtctttattctttgaagaatgtaccagagcatttagcaaaattgtttaaaatagagggaggtaaaggcaaatgtaacttaaattcgggttatgctttcgagtatgaaccattgaggaaagaattatcaaaatccaaatcaaatgcagtgtccctcttgtctcacttgtggctagcaaatacagcagcagccttgagaataaatacagatttgctgcctactagctaccagctggtcaagtttgaagatattgtgcattttcctcagaaaactactgaaaggatttttgcctttcttggaattcctttgtctcctgctagtttaaaccaaatattgtttgccacctctacaaaccttttttaccttccctatgaaggggaaatatcaccaactaatactaatgtttggaaacagaacttgcctagagatgaaattaaactaattgaaaacatctgctggactctgatggatcgcctaggatatccaaagtttatggactaaatgctgcaggtcagcagaaatttgcactaataatacttaccaacccactttgtggatatgaatcagaagagtttgtttattctttagtgtgtgtgtgtgtgtgcacgcgtgtatgtgttcagtgttgtttgcacagagagattgttttaaaaaatggcaccatatttggcctagcaggatttatttttatgtcatcacctcccttgcctttgtttctgaaaattttgtctgctaaaaagtttctgctacagagtggtagatgaagttatatcatggggtcaggggagatgggaaaattttaagtttttgtctaactccccttcatctgtaactgtgctaatctatctagagacctcaaacactgctaaaggccttgcaattgctgctttacccacgcatctcttgctttcaagatggactacaaaagttccttatccttttgaaaaggtcttctgacacacttatcttgcacaaagaaaaagaaaatttcttttactgtgtttaatgttcagtgatatcactgaggaaatggtgaaagctcctatcagaactataggatttcttctgggaaatacagatggaaatacagaatgaatatgtttttttgaggtcggaaactgactttaaaagcctccttgaagttttttacttagaaatataaggaataagtctttgaacaatctgggtggcaagggctggtagattattttagacatgattgtctgtttaaaactctcctttcactttttatcctccctggagctacagctgttcgccatcacatcactcccatcctatcctttctgtcactgtcaagcaaaacaatcagtagttactaatcgctgaactctcaatattgtggggcattttccccccagttgattaattttgctttaaagactgacacagacttagaatcaaatttatttttctggaattaacactctgtgactcaaagtagtgccactgcagtgtctttttaaactggaaacagaattggaaaactgcctgacttatcttgcatccctttgaatgagtttacagactgccagtgtctgcaaaagttgaaagcaaatgggagatgatgtcagaggcatctgtttcctttaccatctgcatcttattataaatgtagtcgtcataaagtgtggtttattttattttggtaggctctgaaatcaaaatgctacgccattataagccagtggagtaattacaatgtattggatgaaaacataaggcagtgtggagacttgatgaaaatctctgtacagattgcagtcttcttcctgatgtttcaaactgtggttcccccaagctctctaacacttggaagtctgtcattctgacctagataaaagtggttctttctcagtagttattattatgtcaaaatgtgcctccagagtgataaagctctgtatatgttagattccagctaaacctaacttggctgtcatttttcttccattatagagtgagtggagactgccccccctccccaacatattccttcccatatctctcatgattgtccctctgtaatttcaaaatgaatgaaattcatgtgaatgtaggttgagagggcactgaagacctgaatctacactagtaatctcaagaaagattattcattctatctcagagttaccggcaagcatataagatgctacttggataatatctacatgaatattgcatgctacatggttgataacactatttccattattgggcagaatctcagtgtttactttcaattcctaggatatgtgatcgtgaatcagatcacatataaaaagtctggattgtcagtagtattagatctgatcaaggtaggaattacaattgcatgcaggtagcaagcaagaaagcagaaactactgttccctttattttaacattgtacagacaatacag

SEQ ID NO: 126 - DNA, 5772 bp, Homo sapiens
  CDS (86)..(2122)
cagaaacatccatcagcattcagtgaacagcaaatatggactatcttttgagttagcgactgggatctggttggagagtcctcttatgtcctctcaggtccatgtgcaagaggcttattatggtcctcaggcagacctggcgcactgtcatgcctacctggtagaaatgagccagctcctgcaaagcatggacgtcctgcatcggacatactcggcaccagctatcaacgccatccagggtggatcttttgaaagtcccaaaaaggaaaaaagatcgcacaggaggtggcggtccagagctattggcaaagatgctaaaggaacactgcaggtcccgaaacctttttctggcccagtaagactacactcctccaatcctaatttgtcaacactagattttggagaagagaaaaattattctgatggctctgaaacctcatcagagttttctaaaatgcaagaagatctgtgtcatattgcccataaagtttacttcactttaaggtcagcttttaatatcatgtcagcggagagagagaaactgaagcagctgatggagcaggatgcctcctcctccccgtctgctcaggtcattggtctgaagaacgccctgtcatccgccctagcacaaaacacagatcttaaagaacgcttacgcagaatccatgccgagtctctgctcctcgactcccccgctgtcgccaagtcgggtgacaatctggcagaggaaaactccagagatgaaaaccgagctctagttcatcagctttctaatgaaagtagactctccatcactgactccctttctgagttttttgatgctcaggaagttctgttatctccaagctcttcagaaaacgagatttctgatgatgactcatatgtcagtgacataagtgataatctttccttagataatctcagtaatgatttagataatgagagacagaccttggggcctgtccttgatagtggtcgggaagcgaagtcccggagaagaacgtgcctgccggcgccctgcccgagcagcagtaacatcagcctgtggaacatcctgaggaacaacatcgggaaggacctgtccaaggtggccatgccggtggagctgaacgagcccctgaacacgctgcagaggctctgcgaggagctggagtacagcgagctcctggacaaggccgcgcagattcccagccccctggaaaggatggtatatgtggcagcctttgccatatcagcgtatgcatctagctactaccgagctggaagcaagccatttaatccggttcttggagaaacatatgaatgtattcgggaggacaagggcttccagtttttttcagaacaggtcagccaccatccgcctatctctgcgtgtcatgctgagtctagaaattttgttttctggcaagatgtgagatggaaaaacaaattctggggcaaatccatggaaattgttccaattggcacaacccatgtgactctgccagtttttggggatcattttgagtggaacaaagtgacctcttgcatccataacatcttaagcgggcagaggtggattgagcactatggagagattgtcatcaagaacctgcatgatgattcctgctactgcaaagtgaattttataaaggcaaaatactggagcactaatgcccatgagattgaaggcacagtgtttgacaggagtggaaaagcggttcatcggctgtttgggaaatggcatgaaagcatctactgtggcggcggctcctcttctgcctgtgtatggagagcaaatcctatgccgaaaggctacgagcaatactatagcttcacacagtttgcgctggaattaaatgaaatggatccatcatcaaagtctttattgccacctactgacactcgatttaggccagaccagaggtttctagaggaagggaacttagaagaagctgaaatacaaaagcagaggattgaacaactgcagagagaaaggcggcgggtcttagaagaaaatcatgtggagcaccagcctcggtttttcaggaaatccgacgatgactcttgggtgagcaacggcacctatttggaacttagaaaagatcttggtttttccaaactggaccatcctgtcttatggtgaaaaagtaaagaagaaagataacattagtgtatttctcctgtgcttgccttctgaagtggcacaaacctgtgtttatatatttaaaagatactctaggatgatcacttgtgcttagcttagcattgtaactctttaagtctatattttcctcagtgcgtttctttacaatttcaaatgttaccctgattgtttatatgaatgtagaacaccttgacatttctttttatatataaactatttaataaaaatgaaagattgaatgttcatgtgtgggttaaaaaaagaagctttaacactaattttccaaaggttagggaagattccaattaaatttatgccttataaaattatgttgtagaaaaaaaatcaacctctcccaggtgcattaagaaataagaattcccagggttactcacccatgcgtaagctacccaagtttaatttggtagctgaaatatctttttgcctcagacagctcttgaattgctcatacagaacaattctgctggtgctggagtctgaagaatattttcatttgcattttagtggttagggagaggatataagattaatggaatgtatatttttatataagacgtatacggcaccttcttgaaaaggaagcatttgaacttgttcctccctatagttctattgccttatatgcaaaattgtaccctgttgctcagagaaattattcataagagaaaagaattccaattaattaaatatcacaatagcatcccagagagacagtaggaaatttctccttagtgagagctgagtccttgagaagttaagagactgtttcctgcttcccaccccaccccgttttttgtccctccgtttgatcacctccctgttgagtatggaatgtcccagtttaatataaaacatacagtttattccacacagcagtttgactttgtaaaagtttagcaaaataactgattgttttggataactcaacatgtttttcttaaatgctgttttagtattttctacctcttaataagcaccatattttagatcttgtataaaaagttgccatctgccttatagacaaatgtagagaattgatgttcttgctttgtgttgtgttctggtaaagctttaagtgagtgtcttacccctttcctatactttcttgttatccatatcattcttttgtgagttttgcagcagtcttgaataatacagattataactactgaaaggggaaccttcgtctttttaaatgtgtcatttcacattacaataatatgtgtagtagttgaattgtgttatcaaagcatgtccaacttctgtccagatgacattaaaaccaaagcctaattgttaagcctcttattctaaagtccatagcaatgctatggaatatcaagtataatgatgtagtaaaaagatttctccagaaaacactttgagatacttaaagaaattcagagcatatcgaatgttatgaatgaagagtaaaataattacaggaaaagaatgcatgatttttcattgtcacaccaaataaccagttggacaatattgcattttcaaaatggagagttatttaaagtggatgtgtagccttctggaatctgcacgtgactggcattttaaaacaactcattaaatattggattcattttatcgagatgccaagatgaacacaatgtgaatatcatttccatttctaagcagttgaatgacacagtcagattctttggtgtatgctttgttctttccatctcaagcatttatccaaattctgctcacagacatgaggaagcaggctgtagatttaagggcactcaaggggaaaacaaatgtagtttccacagtgtgaggataaatgtagaatcgtggtaatattggctgttaaattggcctgctccagagactggctcaaaaaagaaagaagcaacgaaaacaaaatgcacagcctgaatggacgtagcactgtcatgtggcatttggaaaatctttaattatcctaatgttatttcacttgcccttatgctttattttagagtcccagggacaactggatgaaacattacgtctgtagtcatcttatttgagatgggggtgggaacgaattaaaatatgatagagaactatatgcagattttaaaatctagtcagtactagcatctataaagggcttttctgaaatttaaacagcttggtgatgcatcctgatattataagcttaaaactatcttgagggggaaatgacttcttttctccttctgtcccttttctcaaaagcatctttcccccaaatgtatgtctctaggacattttatagttttaagaggaagaaaacagaaacgtggcatcatttgggaagaaccaaggtagaatttaattttctggactttaaatctcctggttaaataatgctaatcactgtaccatttgagttacatgttttaacctcttttttttttctaattattccatccaaaatttctggtgaattacacagaaatttttggaaatgggactttgtgcaggtaaccaccctgcacttcaggtaatgttcctgtcacagctgtcgactaccccacgctgcaggaaatccattcagaaatgagctaacagtctccagtgtagcaggagagccagtcacttccctccccaggccccaaagcaccccaaggctggtattccttgagtcataggtattaataataaaagcctcaatgcagcttctccatgtagttcctctcctacaagccaggtggattctggtcctaactaaagagatgggagttcacctgagggcaagaagtacccaggatgcccaaacagccgcacaggtgtcctgtgcttcctgtgagacttcctgggggaaatatacaaactaatatattttttaatgtttacgtcatttacactgctgcttttctcatattctgcttttaattacttgtagtaaatcatttgtttgggcttcaagcactgtcttccatctgcatcttccagatttatcatgagtgatcttgttctactgttaaagatgtcaagcctaaaaagtaataaagtttttatttggctgttgaaccttgatgtagcccctactacatacactacaagttatgccttctggctactacagaatctccgcagaccttttagttatgagtagaagcaataagaaggtgtccttatggtcttaggaataatagttccaatgtattggcataatttgtttgaatgtctttattttgatattaacaccggcataaatctatttttgctaccagatgatagctattttcatttgctctattttcctctgcattgtactaatctgttactcagtgttagtcttcatttttctgtgttggaaacctgcgtcatgtaaatatctgcaaatcatgacagtctaaagtgcaaaccattttcagagactttggggaatgcagtgatcagaagtggctaatttattttatttctgattattttatccagagggtacttttttaatggatatttgtaaatcttccacttaaccactgaaaattattttgttttaatcccacccttccatccatacctctgcctccccaaaaagctcctattaatttgcttatccccctcatgtagctagttgaatgtgaataaataacatggaaaaaaaaaaa

SEQ ID NO: 127 - DNA, 4682 bp, Homo sapiens
  CDS (310)..(4443)
tttcgtgggttagacacactcgaataatccctctggctgggctgaatttgtgggaatttaggaagccagagtgctggaaatacagcagcctttgaagtaccctctgttaatttggatggatctcagtgtgccccgttcgagacctctccaccaaccccttctgatcttgcgatttgctcttcttgactttaattagtatctaggaaagtctaaactttggacctacctctttttttgatactcatttttgtacttttgctctctgggattggtttcttaaagaatctggatcctttttaatatgtcaaaatgagtctgctgatgtttacacaactactgctctgtggatttttatatgttcgggttgatggatcgcgtcttcgccaggaggactttcccccgcggattgtggagcatccttccgatgtcatcgtctctaagggcgagcccacgactctgaactgcaaggcggagggccggccaacgcccaccattgagtggtacaaagatggggagcgagtggagactgacaaggacgatccccggtcccacaggatgcttctgcccagcggatccttattcttcttgcgcatcgtgcacgggcgcaggagtaaacctgatgaaggaagctacgtttgtgttgcgaggaactatcttggtgaagcagtgagtcgaaatgcgtctctggaagtggcattgttacgagatgacttccgacaaaaccccacagatgttgtagtggcagctggagagcctgcaatcctggagtgccagcctccccggggacacccagaacccaccatctactggaaaaaagacaaagttcgaattgatgacaaggaagaaagaataagtatccgtggtggaaaactgatgatctccaataccaggaaaagtgatgcagggatgtatacttgtgttggtaccaatatggtgggagaaagggacagtgacccagcagagctgactgtctttgaacgacccacatttctcaggaggccaattaaccaggtggtactggaggaagaagctgtagaatttcgttgtcaagtccaaggagatcctcaaccaactgtgaggtggaaaaaggatgatgcagacttgccaagaggaaggtatgacatcaaagacgattacacactaagaattaaaaagaccatgagtacagatgaaggcacctatatgtgtattgctgagaatcgggttggaaaaatggaagcctctgctacactcaccgtccgagctcccccacagtttgtggttcggccaagagatcagattgttgctcaaggtcgaacagtgacatttccctgtgaaactaaaggaaacccacagccagctgttttttggcagaaagaaggcagccagaacctacttttcccaaaccaaccccagcagcccaacagtagatgctcagtgtcaccaactggagacctcacaatcaccaacattcaacgttccgacgcgggttactacatctgccaggctttaactgtggcaggaagcattttagcaaaagctcaactggaggttactgatgttttgacagatagacctccacctataattctacaaggcccagccaaccaaacgctggcagtggatggtacagcgttactgaaatgtaaagccactggtgatcctcttcctgtaattagctggttaaaggagggatttacttttccgggtagagatccaagagcaacaattcaagagcaaggcacactgcagattaagaatttacggatttctgatactggcacttatacttgtgtggctacaagttcaagtggagagacttcctggagtgcagtgctggatgtgacagagtctggagcaacaatcagtaaaaactatgatttaagtgacctgccagggccaccatccaaaccgcaggtcactgatgttactaagaacagtgtcaccttgtcctggcagccaggtacccctggaacccttccagcaagtgcatatatcattgaggctttcagccaatcagtgagcaacagctggcagaccgtggcaaaccatgtaaagaccaccctctatactgtaagaggactgcggcccaatacaatctacttattcatggtcagagcgatcaacccccaaggtctcagtgacccaagtcccatgtcagatcctgtgcgcacacaagatatcagcccaccagcacaaggagtggaccacaggcaagtgcagaaagagctaggagatgtccttgtccgtcttcataatccagttgtgctgactcccaccacggttcaggtcacatggacggttgatcgccaaccccagtttatccaaggctaccgagtgatgtatcgtcagacttcaggtctgcaggcgacatcttcgtggcagaatttagatgccaaagtcccgactgaacgaagtgctgtcttagtcaacctgaaaaagggggtgacttatgaaattaaagtacggccatattttaatgagttccaaggaatggatagtgaatctaaaacggttcgtactactgaagaagccccaagtgccccaccacagtctgtcactgtactgacagttggaagctacaatagcacaagtattagtgtttcctgggatcctcctcctccagatcaccagaatggaattatccaagaatacaagatctggtgtctaggaaatgaaacgcgattccatatcaacaaaactgtggatgcagccattcggtccgtaataattggtggattattcccaggtattcaataccgggtagaggttgcagctagtaccagtgcaggggttggagtaaagagtgagccacagccaataataatcgggagacgcaatgaagttgtcattactgaaaacaataacagcataactgagcaaatcactgatgtggtgaagcaaccagcctttatagctggtattggtggtgcctgctgggtaattctgatgggttttagcatatggttgtattggcgaagaaagaagaggaagggactcagtaattatgctgttacgtttcaaagaggagatggaggactaatgagcaatggaagccgtccaggtcttctcaatgctggtgatcccagctatccatggcttgctgattcttggccagccacgagcttgccagtaaataatagcaacagtggcccaaatgagattggaaattttggccgtggagatgtgctgccaccagttccaggccaaggggataaaacagcaacgatgctctcagatggagccatttatagtagcattgacttcactaccaaaaccagttacaacagttccagccaaataacacaggctaccccatatgccacgacacagatcttgcattccaacagcatacatgaattggctgtcgatctgcctgatccacaatggaaaagctcaattcagcaaaaaacagatctgatgggatttggttattctctacctgatcagaacaaaggtaacaatggtgggaaaggtgaaaaaaagaagaaaaataaaaactcttctaaaccacagaaaaacaatggatccacttgggccaatgtccctctacctccccccccagtccagccccttcctggcacggagctggaacactatgcagtggaacaacaagaaaatggctatgacagtgatagctggtgcccaccattgccagtacaaacttacttacaccaaggtctggaagatgaactggaagaagatgatgatagggtcccaacacctcctgttcgaggcgtggcttcttctcctgctatctcctttggacagcagtccactgcaactcttactccatccccacgggaagagatgcaacccatgctgcaggctcacctggatgagttgacaagagcctatcagtttgatatagcaaaacaaacatggcacattcaaagcaataatcaacctccacagcctccagttccaccgttaggttatgtgtctggagccttgatttctgatttggaaacggatgttgcagatgatgatgccgacgacgaagaggaagctttagaaatccccaggcccctgagagcactggaccagactcctggatccagcatggacaatctagacagctctgtgacaggaaaagcctttacctcctctcaaagacctcgacctaccagcccattttctactgacagtaacaccagtgcagccctgagtcaaagtcagaggcctcggcccactaaaaaacacaagggagggcggatggaccaacaaccagcattgcctcatcgaagggaaggaatgacagatgaggaggccttggtgccctatagcaagcccagtttcccatctccaggtggccacagctcatcaggaacagcttcttctaagggatccactggacctaggaaaaccgaggtgttgagagcaggccaccagcgcaatgccagcgaccttcttgacataggatatatgggctccaacagtcaaggacagtttacaggtgaattatagtaaatgagaggagacatacaaagctgctctgaaggaccatcaggtccggactcatggaagtgatgactctaaacagtgcaatgaacaatttatttatgtactattaaaagaactgtaaatgcaatgtaaagacacacagccacacatatcccacagatattttcattgtgttcttctcttaagtacaccacccaccttaactctttcttgtcaggagtatataaaaaaaaaaaaaa

SEQ ID NO: 128 - DNA, 4794 bp, Homo sapiens
  CDS (226)..(4791)
atggagccactcgccaggctccagtcaaagagcaaagccgcggggacccactggatccttaccatgaccacagaggggtgggccgaaggcgtggggaggagctccccatccaggtcctctgtcccttccgccagcccctcgacctcggtcaccgtcagcagcatggtcaaacacttcagagctttgcaagagcaggcaaggacctacctagatctcctttgctccatgtgtgacctgtcaaatgcttcggtgaaaaccacagcaaaagacattcaacaaacagagcaaacgattgaacaaaagcttgtccaggcccagaacttaactcagggctgggaagagatcaagcacctgaagtctgagctctggatttacctgcaagatgctgatcagcaactgcagaacatgaagaggaggcactctgagctggagctgaacattgcacagaacatggtttcacaagttaaggattttgttaagaaactacagagcaaacaggcatccgtgaacaccataatagaaaaggtgaataagttaacaaagaaggaggaatcgcctgaacacaaggaaataaatcatttaaatgatcagtggctcgatttgtgccgtcagtctaacaacctgtgcttgcaaagggaagaggatcttcagagaacaagagattaccatgactgtatgaatgttgttgaagtgttcctagaaaaatttactacagaatgggataacttggccagatctgatgcagagagtacagctgtccacctggaagctttgaaaaagttagcattggcattgcaggagagaaagtatgctattgaagatctgaaagatcaaaagcagaaaatgatagagcatctgaatttagatgacaaggagttagtcaaagaacagacgagtcatttagagcaacgttggtttcagcttgaggacctcattaaaaggaaaatccaagtgtcagtcaccaacttggaggagttaaatgtggtgcagtccagatttcaggagctaatggagtgggcagaagagcaacaacccaacatcgccgaggcccttaagcagagccctcctccagatatggctcagaaccttctcatggatcacctggccatctgcagtgaactggaggccaagcagatgctcctgaaatcgcttataaaggacgcagacagggtcatggcagatcttggtctcaatgagcgacaggtcatccagaaggctctctctgatgcacaaagccacgtgaattgtctcagtgacttagtgggccagcgaagaaagtacttaaacaaagccttgtccgagaaaacccagtttctcatggcagtgttccaggccaccagccaaattcagcaacatgagcgaaagataatgttccgtgaacacatctgtctgttaccagatgatgtgagcaaacaagtcaaaacatgtaagagtgcacaagccagcctcaagacttaccaaaatgaagtcactggactttgggcccagggtcgcgaactaatgaaggaagtcacagagcaggaaaagagtgaagtgctggggaagcttcaggaattgcagagtgtctatgacagtgttttacaaaagtgcagtcaccggttacaagaactagagaagaatttggtttctaggaagcattttaaggaagattttgataaagcttgccactggctaaaacaagcagatattgttacatttcctgaaatcaacctaatgaatgagagttctgagcttcatacacaactggctaaataccaaaacattcttgaacaatctccagaatatgaaaatcttctacttacgctgcagagaactgggcagaccatattaccatcgctgaatgaagtcgatcattcctacctcagtgaaaagctaaatgctttgcctcgacaatttaatgtaattgttgccttggctaaagacaagttctataaagtccaggaagcaattcttgctcggaaggaatatgcttccttgattgagttgacaacccagtctctgagtgaacttgaagcccaattcttgaggatgagcaaagttcccaccgacctggccgttgaggaggctctttctctgcaagatggttgcagagccattctggacgaggtggcgggccttggggaggcggtggatgaactgaaccagaaaaaagaaggttttcgcagcacaggtcagccttggcagccagacaagatgctgcaccttgtcaccttatatcacaggctgaagcgacaaacagaacagagggttagcttattagaagacaccaccagtgcttaccaagaacacgagaagatgtgccaacagctggagagacaactgaagtctgtaaaagaggagcagtccaaagtgaatgaggaaacgctgcctgcagaggagaagctcaaaatgtatcactccctggcaggaagtctccaggactcagggattgtactgaaacgagtaaccatacatcttgaagatcttgccccacaccttgaccccttggcttatgagaaagccaggcatcagatccagtcctggcaaggggagttaaaactgttgacttctgccattggtgagacggtgacagaatgtgagagccgaatggtgcagagtatagacttccagactgagatgagtcgctccctggactggctgaggagagtgaaggcagagctcagtgggccggtgtacctagacctcaacctgcaggacatccaagaggaaatcagaaaaatccaaattcatcaggaagaggtccagtccagcttgagaatcatgaatgcgctgagtcacaaggaaaaggagaagttcacaaaggccaaggagctgatttctgcggatttagaacacagcctcgctgagctctcagagctggatggagacatccaggaagccttacgcaccagacaggctaccttgactgaaatatatagccagtgtcaaaggtattatcaggtatttcaagcagccaatgactggcttgaggatgcccaagaaatgttacagctggcaggcaatggcctagacgtggagagcgcagaggaaaatctcaaaagccacatggaatttttcagtacagaggatcagttccatagtaacctggaggagctccacagcctggtagccaccctggacccactcatcaagccaaccggcaaagaagacctagaacagaaagtggcttctctggaactcaggagccagaggatgagccgggactctggtgcccaagtggatctcttgcagagatgcacagctcaatggcacgattaccagaaagcaagggaagaggttattgaattgatgaatgatacagaaaagaaattgtctgagttttctttgttgaagacttcgtctagtcatgaagcggaagaaaaattgtcagaacacaaggctttagtgtcagtggttaactctttccatgagaaaattgtggcccttgaggaaaaagcttcacaactggagaaaaccggaaatgatgccagcaaagccaccctgagcaggtcaatgaccaccgtctggcagcgctggacacgccttcgagctgtggcccaggaccaggagaagatcctggaagatgcagtggatgagtggacgggctttaacaacaaggttaaaaaggccactgaaatgattgatcagctgcaagataagttacctggaagttcagcagagaaagcatcgaaagcagagctcttaactcttcttgaataccacgacacgttcgttctggagctggagcagcagcagtcggccttgggcatgctgcggcagcaaaccctgagcatgctccaggatggagccgccccaacccctggggaagagcctccgctcatgcaggaaatcaccgccatgcaagatcggtgcctgaacatgcaggagaaagtgaagactaatggaaagttggtgaagcaagagctgaaggaccgagaaatggtggagactcagatcaattctgtgaaatgttgggttcaggaaacgaaagaatatttagggaatccaacaatagaaatagatgctcaacttgaagaacttcagattctcctaacagaagccacaaatcaccgacagaacattgaaaaaatggcagaagaacagaaggagaagtacttaggtctttataccatattaccttctgaactctcccttcagttggctgaagtggcgttagatctaaagatccgagatcagatccaagacaaaataaaagaagttgagcagagcaaggccacgagccaggaactcagccggcaaattcagaagttagctaaagacctcacaactattctaactaagctgaaagcgaagacagataatgtagttcaagctaaaactgaccaaaaggtgctgggagaggaattagatggctgtaattcaaagttaatggaattagatgcagcagtacagaaattcttggaacagaatggccaactgggtaagccactggccaagaagataggaaaactgactgaacttcaccagcagaccattagacaagctgagaatcggctctccaagctcaatcaggcagcatcacatttagaagaatacaatgaaatgcttgaattaattttgaagtggattgaaaaagctaaagtcttggctcatggaactattgcatggaattctgcaagccagcttcgggaacaatatattttgcatcaggaggtcgggcagcccagagcaagccatgagtccacatcacatgctggctatgttagttcatttcctctgaagttacatgagaaaaatgttccttttctgtcagtcacgtcatccaggaaattatttcatccttttgtaacttaa

SEQ ID NO: 129 - DNA, 2115 bp, Homo sapiens
  CDS (725)..(1696)
cggccgctgcagccagccccgcggctccctcagacccgcgggcgcagccgccgggggtgaggcgcttggggaccgcgggccgagcggcggggatccccgagcaccatgctggacccgtcttccagcgaagaggagtcggacgaggggctggaagaggaaagccgcgatgtgctggtggcagccggcagctcgcagcgagctcctccagccccgactcgggaagggcggcgggacgcgccggggcgcgcgggcggcggcggcgcggccagatctgtgagcccgagcccctctgtgctcagcgaggggcgagacgagccccagcggcagctggacgatgagcaggagcggaggatccgcctgcagctctacgtcttcgtcgtgaggtgcatcgcgtaccccttcaacgccaagcagcccaccgacatggcccggaggcagcagaagcttaacaaacaacagttgcagttactgaaagaacggttccaggccttcctcaatggggaaacccaaattgtagctgacgaagcattttgcaacgcagttcggagttattatgaggtttttctaaagagtgaccgagtggccagaatggtacagagtggagggtgttctgctaatgacttcagagaagtatttaagaaaaacatagaaaaacgtgtgcggagtttgccagaaatagatggcttgagcaaagagacagtgttgagctcatggatagccaaatatgatgccatttacagaggtgaagaggacttgtgcaaacagccaaactagaatggccctaagtgcagtgtctgaacttattacgagcaaggaacaactctatgaaatgtttcagcagattctgggtattaaaaaactagaacaccagctcctttataatgcatgtcagctggataacgcagatgaacaagcagcccagatcagaagggaacttgatggccggctgcaattggcagataaaatggcaaagaaatatgtgaatgttatattggaggagaagaaaagcaggtggcctgagactctgggactgatctgtgaagtggtgccagatgttccttccaatcccatgaatgaactggtgcaagaaagaaaattccccaaatttatagcaaaagatatggagaatatgtatatagaagagttgcggtcttcagtgaatttgctaatggccaatttggaaagtcttccagtttcgaaaggtggtccggaatttaaattacaaaaattaaaacgttcacagaactctgcatttttggacataggagatgagaatgagattcagctgtcaaagtccgacgtggtactgtcattcaccttagagattgtcataatggaagtgcaaggcctgaagtcagttgctcccaatcgaattgtttactgtacaatggaagtggaaggagaaaaacttcagacagaccaggccgaagcctcaaggccacaatgggggactcaaggagatttcaccaccacccatcctcggcctgtggtcaaagtgaaactcttcacagaaagcactggagttctggccctggaagataaagaactgggaagggtgatattatacccaacttctaatagctccaaatcagctgaattacaccgaatggtagttccaaaaaatagccaggattctgacttaaaaatcaaactggcagtgcgaatggataaaccagcacatatgaagcatagtgggtgagtataaatttgaggatttttttcctgaattattgaatttcatttcagtgtattatttttgtcagtttagtgagagaaccagtatagcaggctttcacatggagttttctcaaaaagtgacatacgtaagttatcttactcaatgtttttatacccatagacggctttatagctcaatacatgagtccttagttaagataactgtatgcgagctaccacgatattggaacttgattgtgttagtattactcatcagtcatattgatacagggcaccagggcactgataccttctaagaaacattcttcaaattacaataatagttgaaacaagcttagcattgaggttcctagaaataaacttccatagactgtataaaaactaaaacatagtgtagatgtaacccaacgaggctat

SEQ ID NO: 130 - DNA, 824 bp, Homo sapiens
  CDS (264)..(734)
cgaccgccaattcggcacgagagagcccggccgctcgccctgtctagtctctccccggccccttgattctccgcgtcttcctcgcaggccagcctaagctcagcctgcattgcgccctcccggcctagggtgtcgctgtaccggcctccgagctccacatagacaagtccggacctcgggcgggggcaggagacggagctgagcggcggggggcagtgtcgcctcggtctagggacggcggcggagtcggtggtccctgcgcgatggccacctcggtgttgtgctgcctgcggtgctgcagagacggggggactggccacatccctctgaaggagatgccggccgtgcagctggacacgcagcacatgggaatctggggtattggtgttgcaactcagaaggttaacttgaatcagattcctcttggccgagatatgcacagtctggtgatgagaaatgatggagccctttaccacaacaatgaagagaaaaataggctgccagcaaacagtcttccgcaggaaggagatgtggtgggtattacttatgaccatgtcgaattaaatgtatacttgaatggaaaaaacatgcattgtccagcatcaggtatacgagggacagtgtatccagttgtttatgttgatgacagtgcaattttggattgccagttcagtgagttttatcatacgcctccacctggttttgaaaaaatattatttgaacagcaaatcttctgaatgtatttgtttttaaaacttgtatttctgcactgttaaaaaatgttcatcatttaataaaactttacctggcctaaaaaaaaaaaa

SEQ ID NO: 131 - DNA, 1646 bp, Homo sapiens
  CDS (418)..(1446)
tccttaattaaattaatccccccccccccccccccggttttccgggcggaagtgaggcgcccagcggaacggcctctggtgacattttcttgggggcggcgcggacgactgaagggacttggtggtagaggctgcggaggcggcgaggttcactttggtcccggcaggggctctgaccgcgacccactgctcgctgccggggcttgttccgaggaggagaaggcggcggtggccgtcgcgtcctgagtcaccgcagcggggaagagtcccggccgggggttcggtgcgtgccccgacggggcgcgcgcgaagcgagcgagaaggcacggagtcgccgcggagcgcaggttgctttcctgttgcatctttgatatcatttcctagactctactccatgatttaacttgaaattctgaaatgaagatggaggaggcagtgggaaaagttgaagaactcattgagtccgaagccccaccaaaagcatctgaacaagagacagccaaggaggaagatggatctgtagaactggaatctcaagttcagaaagatggtgtagcggattctacagttatttcttcaatgccctgcttgttgatggaactgagaagggactcttctgagtctcagttagcatccacagagagtgacaagcctacaactggccgagtttatgagagtgactcctctaatcactgcatgctttccccttcctctagtggtcacctggctgattcagatacgttgtcttccgcagaagagaatgaaccctctcaggcagaaacggcggtagaaggagacccttcaggagtgtctggtgccacagttgggcgcaagtctaggcggtcccgatctgaaagtgaaacttccactatggctgccaagaaaaaccggcaatccagtgataaacagaatggccgagtcgccaaggttaaaggtcatcggagccaaaagcacaaggagaggatcaggctactgaggcagaaacgggaggctgctgcaaggaagaaatataacctgctgcaggacagtagtaccagtgatagtgacctgacttgtgactcaagcacgagctcatcagatgatgatgaagaggtttcagggagcagcaagacaatcactgcagagataccaggtcatttggatccaggattcctagcaagtgacaaaacatctgctggcaatgcgccactcaatgaagaaattaacattgcgtcttcagatagtgaagtagagattgtgggagttcaggaacatgcaaggtgtgttcatcctcgaggtggtgtgattcagagtgtttcttcatggaagcatggctcgggcacgcagtatgttagcaccaggcaaacacagtcatggactgctgtgactccccagcagacttgggcttcaccagcagaagttgttgaccttaccttggatgaggatagcaggcgtaaatacctactgtaatacaatgtcactgtgtttcctctgcactgttcccttccacttcctcatcctctttgtgacatggaagttcattgtcatagcttcagcttcagaagctgtttgtggcatttgtaggattcaaactcatggaaaattccctcctcttcccccctttttttaattaaaagaagtcacttaggaaaataaaaaaaaaaaaa

SEQ ID NO: 132 - DNA, 680 bp, Homo sapiens
  CDS (185)..(610)
atgggcggaagcacccctcctaccaggacccggaaacagatggccaccccgagccggcctatccggaaactggctcgaagaagacggggattggccatcgcttccggaagttgtgagctttgtttcggagcgggagctcttccgagacgcactgggggccggatgaatcctgcttatctgtgaaatgcagttaacacatcagctggacctatttcccgaatgcaggattgttgatccatttcagatacttgtggcagcaaacaaagcagttcacctctacaaactgggaaaaatgaagacaagaactctatctactgaaattattttcaacctttccccaaataacaatatttcagaggctttgaaaaaatttggtatctcagcaaatgacacttcaattctaattgtttacattgaagagggagaaaaacaaataaatcaagaatacctaatatctcaagtagaaggtcatcaggtttctctgaaaaatcttcctgaaataatgaatattacagaagtcaaaaagatatataaactctcttcacaagaagaaagtattgggacattattggatgctatcatttgtagaatgtcaacaaaagatgttttatgaaatgtcagaaatattaacaaaaattctcagcattaaagaaaacattgattttcaaaaaaaaaaaaaa

SEQ ID NO: 133 - DNA, 1188 bp, Homo sapiens
  CDS (174)..(731)
cggctttttaaatgacccaggcgtgggtaaagcatcggtccaggcatcggtggcggggacaggcctaggcagcccgggccacccagactggcccctaatgagctcccaagtggcctgtggggacttggcctcagttttgccagctgtgaactgggaccgtcgctgctaaggccatggacaccttcagcaccaagagcctggctctgcaggcgcagaagaagctcctgagtaagatggcgtccaaggcagtggtggccgtgctggtggatgacaccagcagtgaggtgctggatgagctgtaccgcgccaccagggagttcacgcgcagccgcaaggaggcccagaagatgctcaagaacctggtcaaggtggccctgaagctgggactgctgctgcgtggggaccagctgggcggtgaggagctggcgctgctgcggcgcttccgccaccgggcgcgctgcctggccatgacggccgtcagcttccaccaggtggacttcaccttcgaccggcgcgtgctggccgtcgggctgctcgagtgccgcgacctgctgcaccaggccgtgggtccccacctgaccgccaagtcccacggccgcatcaaccacgtgttcggccacctagccgactgcgacttcctggctgcgctctacggccccgccgagccctaccgctcccacctgcgcaggatctgcgagggcctgggccggatgctggacgagggcagcctctgaaccccggcgccgcccaaccgcgcccctcgcgccttttggggctctcctgctgggcgcgggtggggtttgtgggtttttttccacctcttttctcccaatcggactccggccaaactcccctagacagatgggtgacctgtctcctttgagaggatgctgaggcatctgtagcagctgtttcaaacaccaatgtcacctctcctcctggcccccgcccaatggggagaggaatttggggccctactctggggaccacctttcacccgtttgtactttctgggccacgccgacccctgggtcgcttgatgtaaaagccaaaagctgctgcctcccacttggatcatgtcgcctgggattttcatccctcgcacaaggactacgggttcacacggtgaactgggggaagggaagtgttagggggcaagtcgcggcacccccccttccataaactcac

SEQ ID NO: 134 - DNA, 1887 bp, Homo sapiens
  CDS (369)..(1568)
cgttgtggctgctgtttccttcggctttcctcctcctgctccaccatgtggagccgacggcagggccgcctcaggcccacggtctgcggggtggaggagctacggcgccgccggcgggagcgggagcactgcggaaggcgcggagggagcagcagctggtcagcaagaggctgctgagaaacgacgccccagaggaagctggagagggatgtgtggctgcgatcctcggggaaaccgaggtgcagcagttcctgcggcaagcccagcgggggacagaggaaaaggagagagagggggctctggtcagccttcgtcgaggcttgcagcaccctgaaacacagcaaaccttcatccggctggagggcagcatgcggaccctggtcgggctcctgaccagcaaccaggccctgctgcagcttgaggcggctcggtgcctgcatgagctctctcactccgagcagtccactgttgctgaggcctgcctgccagccacttcttacctcctcacctacctctccagtcacagctcagacttcatacctggcatgaaacaggccaagcccagtgcttttgttgcctgttctcaggagctgtgtctgtatacactgggtaacctgatcgtggagagtgaggctgtgagaaggcagctcctgccacagggcattgttccagccttggctgcctgcatccagtccccccatgtggctgtgctggaagctctcggatatgccttgtcccagcttctacaggctgaggaagctccagagaagatcattccctccatcttggcctccactctccctcagcacatgctacaaatgttgcaacctggcccaaagctcaaccctggggtcgctgtggagtttgcctggtgccttcattacatcatctgcagccaggtcagcaatcctctgctcattggccatggggctctgtctactctggggttgctgctgttggacttggctggggctgtccagaaaagcgaggatgcaggactggagctgctggcatgccccgtgcttcgatgtctaagcaacctgctaactgaggcagcagtggagactgtgggagggcaaatgcagctcagagatgagcgtgttgtggcagccttatttatccttctgcagttctttttccagaaacagcccagtctgctccctgagggcctttggctcctcaacaacctcactgcaaacagtcctagtttctgtacctccttgctctccctggatctgattgagcctctcttacagctgttgccagtatctaacgtggtgagcgtaatggtgctcacagttctgtgcaatgttgcagaaaagggtcctgcttactgccagcggctgtggccagggcccctgcttcccgccttgctgcacacactagccttttctgacactgaagtagtaggccagagtttggagctgctgcatctgctgttcctgtatcagccagaggctgttcaggtcttcctgcagcagtcagggctgcaagccctggaaaggcatcaggaagaggcccagctccaggatcgtgtgtatgctctccagcagacagctcttcaagggtgatcttgtttctcaatgtcactcattcccctctctcttaacatcaagcttgtttgtccagtagagcctttggagatttaggaccataatgaggtctcatgttctctgctcccacacctaagccaagacctttgggtcccagctcctccccttccactcagcactatccaggcaggaggaccaaaagggactcagtgtggtctacttactctggggccctagaatccctgcccccccgccacccttcatgtttgcttcagcagctggtagcttttgatgagacagaataaagttttatttttatattaaaaaaaaaaaa

SEQ ID NO: 135 - DNA, 1061 bp, Homo sapiens
  CDS (386)..(616)
gccaaccatggtgaacttgggtctgtcccgggtgggggacgcggtggctgccaagcacccggtgagaaggccggtctgggacgcgggcctcaaaccccagaagctgacctgagcgaggcggggggccggggcgtgggggtgccctcgtcagggaagagtggcggaggctgggggcactctcttgctaaggggctcagggcgtccgggtgggcataggggaggtgggacgtgtccaagcgcccagggtctcactcctccacagccagggtgtgcccagaggagggacaggagaggcggtgaaggaagagggcaggggatcgagccttcacccgcctctgccaccccgggactcggggagtatgccgcatgccagtcacacgccttcatgaagggcgttttcaccttcgtcacaggcaccggcatggcctttggcttgcagatgttcattcagaggaagtttccataccctttgcagtggagcctcctagtggccgtggttgcaggctctgtggtcagctacggggtgacgagagtggagtcggagaaatgcaacaacctctggctcttcctggagaccgggcagctccccaaagacaggagcacagatcagagaagctaggagagctccagcaggggcacagaggattgggggcaggaggagtctggaacacagccttcatgccccctgaccccaggccgaccctccccacaccctagggtaccccagtcgtatcctctgtccgcatgtgtggccaggcctgacaaacacctgcagatggctgctgccccaacctgggacctgcccaggaggttggagcagaaagggctctccctggggtggtgtttctcctctagggtattgggatgcatgttctgcactgccagcagagagggtgtgtctgggggccaccacctatgggacacggggtcgaaggggcctgtacactctgtcatttcctttctagcccctgcatctccaacaagtccaaggtgacagctggtgctaggggcgtggggttaataaatggcttatccttctctccaaaaaaaaaaaaaaaaaa

SEQ ID NO: 136 - DNA, 2260 bp, Homo sapiens
  CDS (1612)..(2142)
gcaatttcataatatggtaatttttaatattaaaagtaaattgtaaatgtgtctttataaacaatatgcataaaatagatcatattctaaacccttttctttttaaaacgctttttcacagtaaatttcttatggtcagattttccctcagaatagtgcaactggaagaagggaaatgttggcagtggctcaggactctctgctagtacaagtccttgtagatctcctgcaggagcgggtgaagactcatgtctgtctccgtcttcttgatcacctgcagtagctgcacgtgttccgtgacaatctgtctgaggtctgtcattttctggagcagcttggcaaacagctgtgaggactcagggtggttcagcttcagctggagctccagggcttgtagcaggttgtcttgaatgtcttcaatgggcttcacattcagcaaacctgggcggtctccactgagaataatgacagcaataaatattgccaagtcgctgtcatctaattccagtgcattgaacttcacagcaaactcaaacttgggctccataaagtcaccaaaaggctttcgcaggctctttagaaactcccttgtcatgaagccttggccctcggatatgagaaccccatctttattcatcaaggaggccagcattgtgtaaatgatctcgtggactccatatttgaggagagttacttggtcgttcaagtcaagatttacaaaaccaggaatgcttttggcatactctgtgatctcctgcacagcctccacggagcgaaactggcagccctgaaagatgcggatggccacctctttgctctgctcctgcaggggggtgatgtgtttgaacttgattttatcttctcccatcattaaggaattcatgtcatagataacgaatggtgatttgtctgttgtctttcctgtcaagatcgccctcgcctttgctttggtcagcgggaaggactttatgtatgagtcatacaaatgttttgccagggcctgacggaggtcagcggactctggattcagctggtcgatatcactggagatctccgccaacagcttctccttctcggcctgtgcgatccgcccaaacctgatggcattatgagacatccccactgcaaggcatttctgaaaccgacagtactgacatttatttctactttttttgtggatccgacagttaagatcacatctgtcatagataagcttcaatctgattgttctccggaagaaacccttgcatccttcacaagcatgaactccatagtgaaatccagaagctttatctccacagacacgacattcaattgccatgagggagttggaaggctcttcatgaggcttattgtagagctgagtcttctcagaataataaggtggagatgcaggctccactttgattgcactttggtactcttgaagtttcaggtcatacttgtaatctgcaaccactggatctgttcttgtgaatggaatgtcttcgtaatgtggagtagaaatgctggagaagtcaacagtagtgaagggcttgatatcaaaggagtgggagtggtcttccattacggagagatccacggagctgatcccaaagttggtgggccagaatgcgatctctgtgtcaaccatggtcatttctgcggccacggcggcgtggcgcccctctccggtgtcctcgaggccgacccaagccccccaggcggcggctgcggctcgggctcgggaattcccagactcagagagaacccaccatggtgctgtctcctgccgacaagaccaacgtcaaggccgcctggggtaaggtcggcgcgcacgctggcgagtatggtgcggaggccctggagaggcacttcgacctgagccacggctctgcccaggttaagggccacggcaagaaggtggccgacgcgctgaccaacgccgtggcgcacgtggacgacatgcccaacgcgctgtccgccctgagcgacctgcacgcgcacaagcttcgggtggacccggtcaacttcaagctcctaagccactgcctgctggtgaccctggccgcccacctccccgccgagttcacccctgcggtgcacgcctccctggacaagttcctggcttctgtgagcaccgtgctgacctccaaataccgttaagctggagcctcggtggccatgcttcttgccccttgggcctccccccagcccctcctccccttcctgcacccgtacccccgtggtctttgaataaagtctgagtgggcggcaaaaa

SEQ ID NO: 137 - DNA, 2329 bp, Homo sapiens
  CDS (1612)..(2211)
gcaatttcataatatggtaatttttaatattaaaagtaaattgtaaatgtgtctttataaacaatatgcataaaatagatcatattctaaacccttttctttttaaaacgctttttcacagtaaatttcttatggtcagattttccctcagaatagtgcaactggaagaagggaaatgttggcagtggctcaggactctctgctagtacaagtccttgtagatctcctgcaggagcgggtgaagactcatgtctgtctccgtcttcttgatcacctgcagtagctgcacgtgttccgtgacaatctgtctgaggtctgtcattttctggagcagcttggcaaacagctgtgaggactcagggtggttcagcttcagctggagctccagggcttgtagcaggttgtcttgaatgtcttcaatgggcttcacattcagcaaacctgggcggtctccactgagaataatgacagcaataaatattgccaagtcgctgtcatctaattccagtgcattgaacttcacagcaaactcaaacttgggctccataaagtcaccaaaaggctttcgcaggctctttagaaactcccttgtcatgaagccttggccctcggatatgagaaccccatctttattcatcaaggaggccagcattgtgtaaatgatctcgtggactccatatttgaggagagttacttggtcgttcaagtcaagatttacaaaaccaggaatgcttttggcatactctgtgatctcctgcacagcctccacggagcgaaactggcagccctgaaagatgcggatggccacctctttgctctgctcctgcaggggggtgatgtgtttgaacttgattttatcttctcccatcattaaggaattcatgtcatagataacgaatggtgatttgtctgttgtctttcctgtcaagatcgccctcgcctttgctttggtcagcgggaaggactttatgtatgagtcatacaaatgttttgccagggcctgacggaggtcagcggactctggattcagctggtcgatatcactggagatctccgccaacagcttctccttctcggcctgtgcgatccgcccaaacctgatggcattatgagacatccccactgcaaggcatttctgaaaccgacagtactgacatttatttctactttttttgtggatccgacagttaagatcacatctgtcatagataagcttcaatctgattgttctccggaagaaacccttgcatccttcacaagcatgaactccatagtgaaatccagaagctttatctccacagacacgacattcaattgccatgagggagttggaaggctcttcatgaggcttattgtagagctgagtcttctcagaataataaggtggagatgcaggctccactttgattgcactttggtactcttgaagtttcaggtcatacttgtaatctgcaaccactggatctgttcttgtgaatggaatgtcttcgtaatgtggagtagaaatgctggagaagtcaacagtagtgaagggcttgatatcaaaggagtgggagtggtcttccattacggagagatccacggagctgatcccaaagttggtgggccagaatgcgatctctgtgtcaaccatggtcatttctgcggccacggcggcgtggcgcccctctccggtgtcctcgaggccgacccaagccccccaggcggcggctgcggctcgggctcgggaattcccagactcagagagaacccaccatggtgctgtctcctgccgacaagaccaacgtcaaggccgcctggggtaaggtcggcgcgcacgctggcgagtatggtgcggaggccctggagaggatgttcctgtccttccccaccaccaagacctacttcccgcacttcgacctgagccacggctctgcccaggttaagggccacggcaagaaggtggccgacgcgctgaccaacgccgtggcgcacgtggacgacatgcccaacgccgtggcgcacgtggacgacatgcccaacgcgctgtccgccctgagcgacctgcacgcgcacaagcttcgggtggacccggtcaacttcaagctcctaagccactgcctgctggtgaccctggccgcccacctccccgccgagttcacccctgcggtgcacgcctccctggacaagttcctggcttctgtgagcaccgtgctgacctccaaataccgttaagctggagcctcggtggccatgcttcttgccccttgggcctccccccagcccctcctccccttcctgcacccgtacccccgtggtctttgaataaagtctgagtgggcggcaaaaa

SEQ ID NO: 138 - DNA, 1050 bp, Homo sapiens
  CDS (649)..(789)
atggggagaggtgcaccctgccacctgctaacttctcgctagacacagtgtttctgcccaggtgacctgttcagcagcagaacaagccagggccatggggacgggggaagttttcacttggagatggacaccaagacaatgaagatttgttgtccaaataggtcaataattctgggagactcttggaaaaaactgaatatattcaggaccaactctctccctcccctcatcccacatctcaaagcagacaatgtaaagagagaacatctcacacacccagctcgccatgcctactcattcctgaatttcaggtgccatcactgctctttctttcttctttgtcatttgagaaaggatgcaggaggacaattcccacagataatctgaggaatgcagaaaaaccagggcaggacagttatcgacaatgcattagaacttggtgagcatcctctgtagagggactccacccctgctcaacagcttggcttccaggcaagaccaaccacatctggtctctgccttcggtggcccacacacctaagcgtcatcgtcattgccatagcatcatgatgcaacacatctacgtgtagcactacgacgttatgtttgggtaatgtggggatgaactgcatgaggctctgattaaggatgtggggaagtgggctgcggtcactgtcggccttgcaaggccacctggaggcctgtctgttagccagtggtggaggagcaaggcttcaggaagggccagccacatgccatcttccctgcgatcaggcaaaaaagtggaattaaaaagtcaaacctttatatgcatgtgttatgtccattttgcaggatgaactgagtttaaaagaatttttttttctcttcaagttgctttgtcttttccatcctcatcacaagcccttgtttgagtgtcttatccctgagcaatctttcgatggatggagatgatcattaggtacttttgtttcaacctttattcctgtaaatatttctgtgaaaactaggagaacagagatgagatttgacaaaaaaaaattgaattaa

SEQ ID NO: 139 - DNA, 711 bp, Homo sapiens
  CDS (125)..(448)
acatttaccaatcaccaagcatgcaccaaacactgctttaggcactggggacacaaaggggacagagccatcctcctttgacacctggtcttcagttctgtgcccaacgtatatagttttgacaatgaccaggttggactgtttaatgtctttcaacttaccacgtaatcctcttgtagggatcacatctttctttatgatattgtatttctctacctctaacagtaaaaattccattcaacccttaaagctcacttcaaattcttctttgagaagtttttcctttctccgcaaccagatgtacatatttgaactctctttgtacttggagggcacttctttcgtggtagttcttttatttttattaatctctgtatccttagatagtcctccaacaaccaaaggttgggactctgtcttacatatctgggtgcccctcatagtgcagtaataagtaagttgattatatacgagctatgtaacttatattttttaatggttggatatcactgagtttttttttttaagaatttttttattgaggtaaacttcacataacataaaattaactattttaaagtgagaagttcagtgccacttagtattgttaacaatgttgcataaccaccacctttatttaaagttccaaaaaaaatgttctcctctaaaaggaaaccccatcccattaagcagatactttccattccttcc

SEQ ID NO: 140 - DNA, 202 bp, Homo sapiens
  CDS (21)..(152)
aaagaatctaaattgtaatcatgtttcatgtatttgttttattacttacttttatagcacttagtcccagtggtattagactgctatttggtttcatacaaaaaggattaaatttaaattcattcatgtttagacttgagttattacatttttaaaactatcatcttgcctttaatgtttgtggtcctacacaaactattag

SEQ ID NO: 141 - DNA, 499 bp, Homo sapiens
  CDS (66)..(452)
tgcggatcccagcggcggtcgtgtagctgagcagccctggggcttggttctatgtccctgtggctatgtttccagtgtcctctgggtgtttccaagagcaacaagaaacgaataaatctctgccccacagcgcctccaccccagagacccggaccaagttcacacaggacaatctgtgccacgcccagcgcgagcgcctggactcggccaacctgtgggtgctggtggactgcatccttcgcgacacctccgaggacctgggactccagtgtgacgccgtgaacctggccttcgggcgccgctgtgaggaactggaggacgcgcggcacaagctgcagcaccacctgcacaagatgctgcgggaaatcacagatcaggaacacaacgtggtggcactgaaggaggccatcaaggacaaggaggaacctctgcacatagcccagacccggctgtagctgctctcacaccggcccaacatgcagctgtgccgcgatgcagc

SEQ ID NO: 142 - DNA, 685 bp, Homo sapiens
  CDS (59)..(559)
ggatcgacacatctcgtagcggcggtcgtgtagctgagcagccctggggcttggttctatgtccctgtggctatgtttccagtgtcctctgggtgtttccaagagcaacaagaaacgaataaatctctgcgcctccaccccggagacctggaccaagttcacgcaggacaatctgtgccgctcccagcgcgagcacctggactcggccaacctgtgggtgctggtggactgcatctttcgcgacacctccgaggacctgggactccagtgtgacgctgtgaacctggccttcgggcgccgctgtgaggagctggaggacacgcggcacaagctgcagcaccacctgcacaagatgctgcgggaaatcacagatcagaaacaacgtggcggcactgaaggaggccatcaaggacaaggaggcacctctgcacatagcccagacccttctgtacctgcgcttgcactggcccaacatggagctgtgtggcaatgcagcccagttcaggtgctgcctgggcctctgaggcagtcccacttgcccccgtccacctcctcgctgtgaccctttccagtaaacactccaatctccacacacacatcccccgcaggtgctgagaggggagggagactttgcggccacacgcaacatgcaagcacaccttatacacacagatgatatagacat

SEQ ID NO: 143 - DNA, 1251 bp, Homo sapiens
  CDS (343)..(978)
  misc_feature (1)...(1251): n = a,t,c or g
cagggaaaaaaataaagtttatttcttgtccaaaagtaattccaattcaggttttaagtctgaaccttcaaacttgggaagtttttttccaagtcatcagcaagccccttatcaacttcacgtaggattttaataaaatcttcccccccagggctttaaaaaggaaaaaggttttgaaatgcaaaggaacacttttgtttgctcaactggccttcctttactccctgagccaccggctnctttggtaatgcctttttctatctttagatactcttgctcagtctgggaggcataaatgccaaacaagtccgttctgaaaatccaaaatggcttgatgtttacatgcccattttacaactgcttactacagtggatgatggaattcaagcaattgtacattgtcctgacactggaaaagacatttggaatttactttttgacctggtctgccatgaattctgccagtctgatgatccacccatcattcttcaagaacagaaaacagtgctagcctctgttttttcagtgttgtctgccatctatgcctcacagactgagcaagagtatctaaagatagaaaaagtagatcttcctctaattgacagcctcattcgggtcttacaaaatatggaacagtgtcagaaaaaaccagagaactcggcagagtctaacacagaggaaactaaaaggactgatttaacccaagatgatttccacttgaaaatcttaaaggatattttatgtgaatttctttctaatatttttcaggcattaacaaaggagacggtggctcagggagtaaaggaaggccagttgagcaaacagaagtgttcctctgcatttcaaaaccttcttcctttctatagccctgtggtggaagattttattaaaatcctacgtgaagttgataaggcgcttgctgatgacttggaaaaaaacttcccaagtttgaaggaaccttatgcaaaaatccagatgtaatgaggtggctcctttcacccttcacgtggtctgccaggaagttgcctacttgctaaaaggtgtaccctgagcatttgtgactccgagggaaaccaggaacatcatgctgcagaaaccctttggaggaacgtgccaactgctccgtaaccatgagctggctctcctttgatggagagattaatagtttccataattatatcatcctggttgttctggggccagagtttacttagacttgaaagaaattgaagttaatttaaaaaaaaaaaa

SEQ ID NO: 144 - DNA, 726 bp, Homo sapiens
  CDS (151)..(522)
ttctgcaagctcagcagcagaatgcccagagtcttccctggtagatgcaggttccatagcgacgttctcctgcaatgcacgctggtattctgcaatagcagtccatgtttttccttgagcctggatgctttggagccaagctttcgtcccatgcaagggaaacaaccacttctgggacagaggactgctgtctgccctctctggtcaccctgcctagctagaggatctgtgaccccagccatgaggaccctcgccatccttgctgccattctcctggtggccctgcaggcccaggctgagccactccaggcaagagctgatgaggttgctgcagccccggagcagattgcagcggacatcccagaagtggttgtttcccttgcatgggacgaaagcttggctccaaagcatccaggctcaaggaaaaacatggactgctattgcagaataccagcgtgcattgcaggagaacgtcgctatggaacctgcatctaccagggaagactctgggcattctgctgctgagcttgcagaaaaagaaaaatgagctcaaaatttgctttgagagctacagggaattgctattactcctgtaccttctgctcaatttcctttcctcatctcaaataaatgccttgttacaaaaaaaaatatttataatattagaatttagaaaatatcagaggcacttaaaaaagctttacttaaaactattgtagtagtaaa

SEQ ID NO: 145 - DNA, 1838 bp, Homo sapiens
  CDS (228)..(1799)
tgcctctccaggagcccagcgcaggccgcagagccggggccgctgtgagccgagaccgcgggccgcggagctcgggcggccggcgcggagaatttgttcctgttgaagagtggctcctcttctaatttccagactccttgaggttttaggagtctggtaggtgaaattttctacctctaaggagaaacagtacctgctccttcctcaagcgcaagccctccattgctatggataccgaatccacttattctggatattcttactattcaagtcattcgaaaaaatctcacagacaaggggaaagaactagagagagacacaagtcaccccggaataaagacggcagagggtcagaaaagtctgtcaccattcaacctcccactggagagcccctgttgggaaatgattctactcggacagaggaagttcaggatgacaactggggagagaccaccacggccattacaggcacctcggagcacagcatatcccaagaggacattgccaggatcagcaaggacatggaggacagcgtggggctggattgcaaacgctacctgggcctcaccgtcgcctcttttcttggacttctagttttcctcacccctattgccttcatccttttacctccgatcctgtggagggatgagctggagccttgtggcacaatttgtgaggggctctttatctccatggcattcaaactcctcattctgctcatagggacctgggcactttttttccgcaagcggagagctgacatgccacgggtgtttgtgtttcgtgcccttttgttggtcctcatctttctctttgtggtttcctattggcttttttacggggtccgcattttggactctcgggaccggaattaccagggcattgtgcaatatgcagtctcccttgtggatgccctcctcttcatccattacctggccatcgtcctgctggagctcaggcagctgcagcccatgttcacgctgcaggtggtccgctccaccgatggcgagtcccgcttctacagcctgggacacctgagtatccagcgagcagcattggtggtcctagaaaattactacaaagatttcaccatctataacccaaacctcctaacagcctccaaattccgagcagccaagcatatggccgggctgaaagtctacaatgtagatggccccagtaacaatgccactggccagtcccgggccatgattgctgcagctgctcggcgcagggactcaagccacaacgagttgtattatgaagaggccgaacatgaacggcgagtaaagaagcggaaagcaaggctggtggttgcagtggaagaggccttcatccacattcagcgtctccaggctgaggagcagcagaaagccccaggggaggtgatggaccctagggaggccgcccaggccattttcccctccatggccagggctctccagaagtacctgcgcatcacccggcagcagaactaccacagcatggagagcatcctgcagcacctggccttctgcatcaccaacggcatgacccccaaggccttcctagaacggtacctcagtgcgggccccaccctgcaatatgacaaggaccgctggctctctacacagtggaggcttgtcagtgatgaggctgtgactaatggattacgggatggaattgtgttcgtccttaagtgcttggacttcagcctcgtagtcaatgtgaagaaaattccattcatcatactctctgaagagttcatagaccccaaatctcacaaatttgtccttcgcttacagtctgagacatccgtttaaaagttctatatttgtggctttattaaaaaaaaaaaa

SEQ ID NO: 146 - DNA, 3485 bp, Homo sapiens
  CDS (4)..(2838)
agcatgggggcccggagcggagctcggggcgcgctgctgctggcactgctgctctgctgggacccgaggctgagccaagcaggcactgattctggcagcgaggtgctccctgactccttcccgtcagcgccagcagagccgctgccctacttcctgcaggagccacaggacgcctacattgtgaagaacaagcctgtggagctccgctgccgcgccttccccgccacacagatctacttcaagtgcaacggcgagtgggtcagccagaacgaccacgtcacacaggaaggcctggatgaggccaccggcctgcgggtgcgcgaggtgcagatcgaggtgtcgcggcagcaggtggaggagctctttgggctggaggattactggtgccagtgcgtggcctggagctccgcgggcaccaccaagagtcgccgagcctacgtccgcatcgcctacctgcgcaagaacttcgatcaggagcctctgggcaaggaggtgcccctggaccatgaggttctcctgcagtgccgcccgccggagggggtgcctgtggccgaggtggaatggctcaagaatgaggatgtcatcgaccccacccaggacaccaacttcctgctcaccatcgaccacaacctcatcatccgccaggcccgcctgtcggacactgccaactatacctgcgtggccaagaacatcgtggccaaacgccggagcaccactgccaccgtcatcgtctacgtgaatggcggctggtccagctgggcagagtggtcaccctgctccaaccgctgtggccgaggctggcagaagcgcacccggacctgcaccaaccccgctccactcaacggaggggccttctgcgagggccaggcattccagaagaccgcctgcaccaccatctgcccagtcgatggggcgtggacggagtggagcaagtggtcagcctgcagcactgagtgtgcccactggcgtagccgcgagtgcatggcgcccccaccccagaacggaggccgtgactgcagcgggacgctgctcgactctaagaactgcacagatgggctgtgcatgcaaaataagaaaactctaagcgaccccaacagccaggtgctggaggcctcaggggatgcggcgctgtatgcggggctcgtggtggccatcttcgtggtcgtggcaatcctcatggcggtgggggtggtggtgtaccgccgcaactgccgtgacttcgacacagacatcactgactcatctgctgccctgactggtggtttccaccccgtcaactttaagacggcaaggcccagcaacccgcagctcctacacccctctgtgcctcctgacctgacagccagcgccggcatctaccgcggacccgtgtatgccctgcaggactccaccgacaaaatccccatgaccaactctcctctgctggaccccttacccagccttaaggtcaaggtctacagctccagcaccacgggctctgggccaggcctggcagatggggctgacctgctgggggtcttgccgcctggcacataccctagcgatttcgcccgggacacccacttcctgcacctgcgcagcgccagcctcggttcccagcagctcttgggcctgccccgagacccagggagcagcgtcagcggcacctttggctgcctgggtgggaggctcagcatccccggcacaggggtcagcttgctggtgcccaatggagccattccccagggcaagttctacgagatgtatctactcatcaacaaggcagaaagtaccctcccgctttcagaagggacccagacagtattgagcccctcggtgacctgtggacccacaggcctcctgctgtgccgccccgtcatcctcaccatgccccactgtgccgaagtcagtgcccgtgactggatctttcagctcaagacccaggcccaccagggccactgggaggaggtggtgaccctggatgaggagaccctgaacacaccctgctactgccagctggagcccagggcctgtcacatcctgctggaccagctgggcacctacgtgttcacgggcgagtcctattcccgctcagcagtcaagcggctccagctggccgtcttcgcccccgccctctgcacctccctggagtacagcctccgggtctactgcctggaggacacgcctgtagcactgaaggaggtgctggagctggagcggactctgggcggatacttggtggaggagccgaaaccgctaatgttcaaggacagttaccacaacctgcgcctctccctccatgacctcccccatgcccattggaggagcaagctgctggccaaataccaggagatccccttctatcacatttggagtggcagccagaaggccctccactgcactttcaccctggagaggcacagcttggcctccacagagctcacctgcaagatctgcgtgcggcaagtggaaggggagggccagatattccagctgcataccactctggcagagacacctgctggctccctggacactctctgctctgcccctggcagcactgtcaccacccagctgggaccttatgccttcaagatcccactgtccatccgccagaagatatgcaacagcctagatgcccccaactcacggggcaatgactggcggatgttagcacagaagctctctatggaccggtacctgaattactttgccaccaaagcgagccccacgggtgtgatcctggacctctgggaagctctgcagcaggacgatggggacctcaacagcctggcgagtgccttggaggagatgggcaagagtgagatgctggtggctgtggccaccgacggggactgctgagcctcctgggacagcgggctggcagggactggcaggaggcaggtgcagggaggcctggggcagcctcctgatggggatgtttggcctctgcttcctcccagttcacagccagagttgcctctcctcctcctcttccccaacccccagaccatgaccagccttagaaaatccatgtactctgttgttagagggcccagagttccttctccacccccgctctctctctcttggcctgagatctctgtgcaggaaccaagatggggctgaagcctctggaggcagttggttgggggcgggcaggcaggaggccctccctccacccccccaccctcagcccggcaacttctgggttccatgggttttagttccgttctcgttttcttcctccgttattgatttctcctttctccctaagcccccttctgcttccacgcccttttcctctttgaagagtcaagtacaattcagacaaactgctttctcctgtccaaaagcaaaaaggcaaaggaaagaaagaaagcttcagaccgctagtaaggctcaaagaagaagaaaaacaccaaaaccacaagggaaaagaaaaacccagtttcttaggaaacgcaaacgatttattatccagattatttggataagtccttttt

SEQ ID NO: 147 - protein, 539 aa, Homo sapiens
MAAGGSAPEPRVLVCLGALLAGWVTVGLEAVVIWRSYENVTLHCGNISGLRGQVTWYRNNSEPVFLLSSNSSLRPAEPRFSLVDATSLHIESLSLGDEGIYTCQEILNVTQWFQVWLQVASGPYQIEVHIVATGTLPNGTLYAARGSQVDFSCNSSSRPPPVVEWWFQALNSSSESFGHNLTVNFFSLLLISPNLQGNYTCLALNQLSKRHRKVTTELLVYYPPPSAPQCWAQMASGSFMLQLTCRWDGGYPDPDFLWIEEPGGVIVGKSKLGVEMLSESQLSDGKKFKCVTSHIVGPESGASCMVQIRGPSLLSEPMKTCFTGGNVTLTCQVSGAYPPAKILWLRNLTQPEVIIQPSSRHLITQDGQNSTLTIHNCSQDLDEGYYICRADSPVGVREMEIWLSVKEPLNIGGIVGTIVSLLLLGLAIISGLLLHYSPVFCWKGNTSRGQYMDDVMVLVDSEEEEEEEEEEEEDAAVGEQEGAREREELPKEIPKQDHIHRVTALVNGNIEQMGNGFQDLQDDSSEEQSDIVQEEDRPV

SEQ ID NO: 148 - protein, 388 aa, Homo sapiens [sequence omitted]

SEQ ID NO: 149 - protein, 73 aa, Homo sapiens [sequence omitted]

SEQ ID NO: 150 - protein, 99 aa, Homo sapiens
MEALANVNFPRKSFRPEDAGKESGSQGGFCVPAARPQTMVTGPSCSSPGLQNFSPQRKENRACACWQNAGPAPKNPMCVRLKVGRPQASQRKLKETGLC

SEQ ID NO: 151 - protein, 190 aa, Homo sapiens
MRSLCQPWSFLRPRRRGAPLRCPRGRPKPPRRRLRLGLGNSQTQREPTMVLSPADKTNVKAAWGKVGAHAGEYGAEALERMFLSFPTTKTYFPHFDLSHGSAQVKGHGKKVADALTNAVAHVDDMPNALSALSDLHAHKLRVDPVNFKLLSHCLLVTLAAHLPAEFTPAVHASLDKFLASVSTVLTSKYR

SEQ ID NO: 152 - protein, 288 aa, Homo sapiens
MSRLRALLGLGLLVAGSRLPRIKSQTIACRSGPTWWGPQRLNSGGRWDSEVMASTVVKYLSQEEAQAVDQELFNEYQFSVDQLMELAGLSCATAIAKAYPPTSMSRSPPTVLVICGPGNNGGDGLVCARHLKLFGYEPTIYYPKRPNKPLFTALVTQCQKMDIPFLGEMPAEPMTIDELYELVVDAIFGFSFKGDVREPFHSILSVLKGLTVPIASIDIPSGWDVEKGNAGGIQPDLLISLTAPKKSATQFTGRYHYLGGRFVPPALEKKYQLNLPPYPDTECVYRLQ

SEQ ID NO: 153 - protein, 112 aa, Homo sapiens
MLKGNSNLNRFVYFYYYFLRWSLALSLWLECSGTISAHCNLHLPGSSDSPASASPVTGITGTCHHAQLIFLYFYYRRGFAMLLRLVSNSWAQAIHLPWLPKVLGLQAPAPDL

SEQ ID NO: 154 - protein, 361 aa, Homo sapiens
MFSSVAHLARANPFNTPHLQLVHDGLGDLRSSSPGPTGQPRRPRNLAAAAVEEYSCEFGSAKYYALCGFGGVLSCGLTHTAVVPLDLVKCRMQVDPQKYKGIFNGFSVTLKEDGVRGLAKGWAPTFLGYSMQGLCKFGFYEVFKVLYSNMLGEENTYLWRTSLYLAASASAEFFADIALAPMEAAKVRIQTQPGYANTLRDAAPKMYKEEGLKAFYKGVAPLWMRQIPYTMMKFACFERTVEALYKFVVPKPRSECSKPEQLVVTFVAGYIAGVFCAIVSHPADSVVSVLNKEKGSSASLVLKRLGFKGVWKGLFARIIMIGTLTALQWFIYDSVKVYFRLPRPPPPEMPESLKKKLGLTQ

SEQ ID NO: 155 - protein, 79 aa, Homo sapiens
MAHKQIYYSDKYFDEHYEYRHVMLPRELSKQVPKTHLMSEEEWRRLGVQQSLGWVHYMIHEPEPHILLFRRPLPKDQQK

SEQ ID NO: 156 - protein, 245 aa, Homo sapiens
MEKTELIQKAKLAEQAERYDDMATCMKAVTEQGAELSNEERNLLSVAYKNVVGGRRSAWRVISSIEQKTDTSDKKLQLIKDYREKVESELRSICTTVLELLDKYLIANATNPESKVFYLKMKGDYFRYLAEVACGDDRKQTIDNSQGAYQEAFDISKKEMQPTHPIRLGLALNFSVFYYEILNNPELACTLAKTAFDEAIAELDTLNEDSYKDSTLIMQLLRDNLTLWTSDSAGEECDAAEGAEN

SEQ ID NO: 157 - protein, 366 aa, Homo sapiens
MDTGVIEGGLNVTLTIRLLMHGKEVGSIIGKKGESVKKMREESGARINISEGNCPERIITLAGPTNAIFKAFAMIIDKLEEDISSSMTNSTAASRPPVTLRLVVPASQCGSLIGKGGCKIKEIRESTGAQVQVAGDMLPNSTERAITIAGIPQSIIECVKQICVVMLETLSQSPPKGVTIPYRPKPSSSPVIFAGGQDRYSTGSDSASFPHTTPSMCLNPDLEGPPLEAYTIQGQYAIPQPDLTKLHQLAMQQSHFPMTHGNTGFSGIESSSPEVKGYWAGLDASAQTTSHELTIPNDLIGCIIGRQGAKINEIRQMSGAQIKIANPVEGSTDRQVTITGSAASISLAQYLINVRLSSETGGMGSS

SEQ ID NO: 158 - protein, 173 aa, Homo sapiens
MSAWGPSGNPSPRSGGGPGARLTLPALQMTVHNLYLFDRNGVCLHYSEWHRKKQAGIPKEEEYKLMYGMLFSIRSFVSKMSPLDMKDGFLAFQTSRYKLHYYETPTGIKVVMNTDLGVGPIRDVLHHIYSALYVELVVKNPLCPLGQTVQSELFRSRLDSYVRSLPFFSARAG

SEQ ID NO: 159 - protein, 148 aa, Homo sapiens
MAESDWDTVTVLRKKGPTAAQAKSKQAILAAQRRGEDVETSKKWAAGQNKQHSITKNTAKLDRETEELHHDRVTLEVGKVIQQGRQSKGLTQKDLATKINEKPQVIADYESGRAIPNNQVLGKIERAIGLKLRGKDIGKPIEKGPRAK

SEQ ID NO: 160 - protein, 113 aa, Homo sapiens
MTPGVFHASPPQSQRVPRQAPCEWAIRNIGQKPKEPNCHNCGTHIGLRSKTLRGTPNYLPIRQDTHPPSVIFCLAGVGVPGGTCRPAPCVPRFAALPWATNHPGPGCLSDLRA

SEQ ID NO: 161 - protein, 61 aa, Homo sapiens
MDPNCSCAAGVSCTCAGSCKCKECKCTSCKKSCCSCCPVGCSKCAQGCVCKGASEKCSCCD

SEQ ID NO: 162 - protein, 172 aa, Homo sapiens
MSCTIEKALADAKALVERLRDHDDAAESLIEQTTALNKRVEAMKQYQEEIQELNEVARHRPRSTLVMGIQQENRQIRELQQENKELRTSLEEHQSALELIMSKYREQMFRLLMASKKDDPGIIMKLKEQHSKIDMVHRNKSEGFFLDASRHILEAPQHGLERRHLEANQNVH

SEQ ID NO: 163 - protein, 343 aa, Homo sapiens
MAEQLSPGKAVDQVCTFLFKKPGRKGAAGRRKRPACDPEPGESGSSSDEGCTVVRPEKKRVTHNPMIQKTRDSGKQKAAYGDLSSEEEEENEPESLGVVYKSTRSAKPVGPEDMGATAVYELDTEKERDAQAIFERSQKIQEELRGKEDDKIYRGINNYQKYMKPKDTSMGNASSGMVRKGPIRAPEHLRATVRWDYQPDICKDYKETGFCGFGDSCKFLHDRSDYKHGWQIERELDEGRYGVYEDENYEVGSDDEEIPFKCFICRQSFQNPVVTKCRHYFCESCALQHFRTTPRCYVCDQQTNGVFNPAKELIAKLEKHRATGEGGASDLPEDPDEDAIPIT

SEQ ID NO: 164 - protein, 462 aa, Homo sapiens
MARVLGAPVALGLWSLCWSLAIATPLPPTSAHGNVAEGETKPDPDVTERCSDGWSFDATTLDDNGTMLFFKGEFVWKSHKWDRELISERWKNFPSPVDAAFRQGHNSVFLIKGDKVWVYPPEKKEKGYPKLLQDEFPGIPSPLDAAVECHRGECQAEGVLFFQGDREWFWDLATGTMKERSWPAVGNCSSALRWLGRYYCFQGNQFLRFDPVRGEVPPRYPRDVRDYFMPCPGRGHGHRNGTGHGNSTHHGPEYMRCSPHLVLSALTSDNHGATYAFSGTHYWRLDTSRDGWHSWPIAHQWPQGPSAVDAAFSWEEKLYLVQGTQVYVFLTKGGYTLVSGYPKRLEKEVGTPHGIILDSVDAAFICPGSSRLHIMAGRRLWWLDLKSGAQATWTELPWPHEKVDGALCMEKSLGPNSCSANGPGLYLIHGPNLYCYSDVEKLNAAKALPQPQNVTSLLGCTH

SEQ ID NO: 165 - protein, 280 aa, Homo sapiens
MDLQGRGVPSIDRLRVLLMLFHTMAQIMAEQEVENLSGLSTNPEKDIFVVRENGTTCLMAEFAAKFIVPYDVWASNYVDLITEQADIALTRGAEVKGRCGHSQSELQVFWVDRAYALKMLFVKESHNMSKGPEATWRLSKVQFVYDSSEKTHFKDAVSAGKHTANSHHLSALVTPAGKSYECQAQQTISLASSDPQKTVTMILSAVHIQPFDIISDFVFSEEHKCPVDEREQLEETLPLILGLILGLVIMVTLAIYHVHHKMTANQVQIPRDRSQYKHMG

SEQ ID NO: 166 - protein, 494 aa, Homo sapiens
MEACISVLPTVSGNTDIQVEIALAMQPLRSENAQLRRQLRILNQQLREQQKTQKPSGAVDCNLELFSLQSLNMSLQNQLEESLKSQELLQSKNEELLKVIENQKDENKKFSSIFKDKDQTILENKQQYDIEITRIKIELEEALVNVKSSQFKLETAEKENQILGITLRQRDAEVTRLRELTRTLQTSMAKLLSDLSVDSARCKPGNNLTKSLLNIHDKQLQHDPAPAHTSIMSYLNKLETNYSFTHSEPLSTIKNEETIEPDKTYENVLSSRGPQNSNTRGMEEASAPGIISALSKQDSDEGSETMALIEDEHNLDNTIYIPFARSTPEKKSPLSKRLSPQPQIRAATTQLVSNSGLAVSGKENKLCTPVICSSSTKEAEDAPEKLSRASDMKDTQLLKKIKEAIGKIPAATKEPEEQTACHGPSGCLSNSLQVKGNTVCDGSVFTSDLMSDWSISSFSTFTSRDEQDFRNGLAALDANIARLQKSLRTGLLEK

SEQ ID NO: 167 - protein, 259 aa, Homo sapiens
MNKLKSSQKDKVRQFMIFTQSSEKTAVSCLSQNDWKLDVATDNFFQNPELYIRESVKGSLDRKKLEQLYNRYKDPQDENKIGIDGIQQFCDDLALDPASISVLIIAWKFRAATQCEFSKQEFMDGMTELGCDSIEKLKAQIPKMEQELKEPGRFKDFYQFTFNFAKNPGQKGLDLEMAIAYWNLVLNGRFKFLDLWNKFLLEHHKRSIPKDTWNLLLDFSTMIADDMSNYDEEGAWPVLIDDFVEFARPQIAGTKSTTV

SEQ ID NO: 168 - protein, 193 aa, Homo sapiens
MAGKKVLIVYAHQEPKSFNGSLKNVAVDELSRQGCTVTVSDLYAMNLEPRATDKDITGTLSNPEVFNYGVETHEAYKQRSLASDITDEQKKVREADLVIFQGKLALLSVTTGGTAEMYTKTGVNGDSRYFLWPLQHGTLHFCGFKVLAPQISFAPEIASEEERKGMVAAWSQRLQTIWKEEPIPCTAHWHFGQ

SEQ ID NO: 169 - protein, 392 aa, Homo sapiens
MDALVEDDICILNHEKAHKRDTVTPVSIYSGDESVASHFALVTAYEDIKKRLKDSEKENSLLKKRIRFLEEKLIARFEEETSSVGREQVNKAYHAYREVCIDRDNLKSKLDKMNKDNSESLKVLNEQLQSKEVELLQLRTEVETQQVMRNLNPPSSNWEVEKLSCDLKIHGLEQELELMRKECSDLKIELQKAKQTDPYQEDNLKSRDLQKLSISSDNMQHAYWELKREMSNLHLVTQVQAELLRKLKTSTAIKKACAPVGCSEDLGRDSTKLHLMNFTATYTRHPPLLPNGKALCHTTSSPLPGDVKVLSEKAILQSWTDNERSIPNDGTCFQEHSSYGRNSLEDNSWVFPSPPKSSETAFGETKTKTLPLPNLPPLHYLDQHNQNCLYKN

SEQ ID NO: 170 - protein, 188 aa, Homo sapiens
MFHQIWAALLYFYGIILNSIYQCPEHSQLTTLGVDGKEFPEVHLGQWYFIAGAAPTKEELATFDPVDNIVFNMAAGSAPMQLHLRATIRMKDGLCVPRKWIYHLTEGSTDLRTEGRPDMKTELFSSSCPGGIMLNETGQGYQRFLLYNRSPHPPEKCVEEFKSLTSCLDSKAFLLTPRNQEACELSNN

SEQ ID NO: 171 - protein, 537 aa, Homo sapiens
MASALSYVSKFKSFVILFVTPLLLLPLVILMPAKFVRCAYVIILMAIYWCTEVIPLAVTSLMPVLLFPLFQILDSRQVCVQYMKDTNMLFLGGLIVAVAVERWNLHKRIALRTLLWVGAKPARLMLGFMGVTALLSMWISNTATTAMMVPIVEAILQQMEATSAATEAGLELVDKGKAKELPGSQVIFEGPTLGQQEDQERKRLCKAMTLCICYAASIGGTATLTGTGPNVVLLGQMNELFPDSKDLVNFASWFAFAFPNMLVMLLFAWLWLQFVYMRFNFKKSWGCGLESKKNEKAALKVLQEEYRKLGPLSFAEINVLICFFLLVILWFSRDPGFMPGWLTVAWVEGETKYVSDATVAIFVATLLFIVPSQKPKFNFRSQTEEERKTPFYPPPLLDWKVTQEKVPWGIVLLLGGGFALAKGSEASGLSVWMGKQMEPLHAVPPAAITLILSLLVAVFTECTSNVATTTLFLPIFASMSRSIGLNPLYIMLPCTLSASFAFMLPVATPPNAIVFTYGHLKVADMVTQLFLFTPVGL

SEQ ID NO: 172 - protein, 567 aa, Homo sapiens
MEEKTQIKTFLGSKLPKYGTKSVRSTLQPMPNGTPVNLLGTSKNSNVKSYIKNNGSDCPSSHSFNWRKANKYQLCAQGVEEPNNTQNSHDKIIDPEKRVPTQGMFDKNGIKGGLKSVSLFTSKLAKPSTMFVSSTEELNQKSFSGPSNLGKFTKGTLLGRTSYSSINTPKSQLNGFYGNRSAGSMQRPRANSCATRSSSGESLAQSPDSSKSINCEKMVRSQSFSHSIQNSFLPPSSITRSHSFNRAVDLTKPYQNQQLSIRVPLRSSMLTRNSRQPEVLNGNEHLGYGFNRPYAAGGKKLALPNGPGVTSTLGYRMVHPSLLKSSRSPFSGTMTVDGNKNSPADTCVEEDATVLAKDRAANKDQELIENESYRTKNNQTMKHDAKMRYLSDDVDDISLSSLSSSDKNDLSEDFSDDFIDIEDSNRTRITPEEMSLKEEKHENGPPQDMFDSPKENEKAFSKTDEWIDISVSDRSECTKHTSGNNLVSPDTDYRAGSSFELSPSDSSDGTYMWDEEGLEPIGNVHPVGSYESSEMNSIVCMDLYTLGIFCLPYYRETCDMIDFVKNL

SEQ ID NO: 173 - protein, 159 aa, Homo sapiens
MPKFYCDYCDTYLTHDSPSVRKTHCSGRKHKENVKDYYQKWMEEQAQSLIDKTTAAFQQGKIPPTPFSAPPPAGAMIPPPPSLPGPPRPGMMPAPHMGGPPMMPMMGPPPPGMMPVGPAPGMRPPMGGHMPMMPGPPMMRPPARPMMVPTRPGMTRPDR

SEQ ID NO: 174 - protein, 906 aa, Homo sapiens
MPLRLDIKRKLTARSDRVKSVDLHPTEPWMLASLYNGSVCVWNHETQTLVKTFEVCDLPVRAAKFVARKNWVVTGADDMQIRVFNYNTLERVHMFEAHSDYIRCIAVHPTQPFILTSSDDMLIKLWDWDKKWSCSQVFEGHTHYVMQIVINPKDNNQFASASLDRTIKVWQLGSSSPNFTLEGHEKGVNCIDYYSGGDKPYLISGADDRLVKIWDYQNKTCVQTLEGHAQNVSCASFHPELPIIITGSEDGTVRIWHSSTYRLESTLNYGMERVWCVASLRGSNNVALGYDEGSIIVKLGREEPAMSMDANGKIIWAKHSEVQQANLKAMGDAEIKDGERLPLAVKDMGSCEIYPQTIQHNPNGRFVVVCGDGEYIIYTAMALRNKSFGSAQEFAWAHDSSEYAIRESNSIVKIFKNFKEKKSFKPDFGAESIYGGFLLGVRSVNGLAFYDWDNTELIRRIEIQPKHIFWSDSGELVCIATEESFFILKYLSEKVLAAQETHEGVTEDGIEDAFEVLGEIQEIVKTGLWVGDCFIYTSSVNRLNYYVGGEIVTIAHLDRTMYLLGYIPKDNRLYLGDKELNIISYSLLVSVLEYQTAVMRRDFSMADKVLPTIPKEQRTRVAHFLEKQGFKQQALTVSTDPEHRFELALQLGELKIAYQLAVEAESEQKWKQLAELAISKCQFGLAQECLHHAQDYGGLLLLATASGNANMVNKLAEGAERDGKNNVAFMSYFLQGKVDACLELLIRTGRLPEAAFLARTYLPSQVSRVVKLWRENLSKVNQKAAESLADPTEYENLFPGLKEAFVVEEWVKETHADLWPAKQYPLVTPNEERNVMEEGKDFQPSRSTAQQELDGKPASPTPVIVASHTANKEEKSLLELEVDLDNLELEDIDTTDINLDEDILDD

SEQ ID NO: 175 - protein, 883 aa, Homo sapiens [sequence omitted]

SEQ ID NO: 176 - protein, 65 aa, Homo sapiens
MHTSTSSSVTKSYISSQTNGETGQLVHRFTVPAPVVIILIILCVMAGIIGTILLISYSIRRLIKA

SEQ ID NO: 177 - protein, 219 aa, Homo sapiens
MPRGRKSRRRRNARAAEENRNNRKIQASEASETPMAASVVASTPEDDLSGPEEDPSTPEEASTTPEEASSTAQAQKPSVPRSNFQGTKKSLLMSILALIFIMGNSAKEALVWKVLGKLGMQPGRQHSIFGDPKKIVTEEFVRRGYLIYKPVPRSSPVEYEFFWGPRAHVESSKLKVMHFVARVRNRCSKDWPCNYDWDSDDDAEVEAILNSGARGYSAP

SEQ ID NO: 178 - protein, 125 aa, Homo sapiens
MGLAGVCALRRSAGYILVGGAGGQSAAAAARRCSEGEWASGGVRSFSRAAAAMAPIKVRLLADPTGAFGKETDLLLDDSLVSIFGNRRLKRFSMVVQDGIVKALNVEPDGTGLTCSLAPNIISQL

SEQ ID NO: 179 - protein, 237 aa, Homo sapiens
MAAASGSVLQRCIVSPAGRHSASLIFLHGSGDSGQGLRMWIKQVLNQDLTFQHIKIIYPTAPPRSYTPMKGGISNVWFDRFKITNDCPEHLESIDVMCQVLTDLIDEEVKSGIKKNRILIGGFSMGGCMAMHLAYRNHQDVAGVFALSSFLNKASAVYQALQKSNGVLPELFQCHGTADELVLHSWAEETNSMLKSLGVTTKFHSFPNVYHELSKTELDILKLWILTKLPGEMEKQK

SEQ ID NO: 180 - protein, 153 aa, Homo sapiens
MNVGVAHSEVNPNTRVMNSRGMWLTYALGVGLLHIVLLSIPFFSVPVAWTLTNIIHNLGMYVFLHAVKGTPFETPDQGKARLLTHWEQLDYGVQFTSSRKFFTISPIILYFLASFYTKYDPTHFILNTASLLSVLIPKMPQLHGVRIFGINKY

SEQ ID NO: 181 - protein, 105 aa, Homo sapiens
MGETEGKKDEADYKRLQTFPLVRHSDMPEEMRVETMELCVTACEKFSNNNESAAKMIKETMDKKFGSSWHVVIGEGFGFEITHEVKNLLYLYFGGTLAVCVWKCS

SEQ ID NO: 182 - protein, 70 aa, Homo sapiens
MSGPRPVVLSGPSGAGKSTLLKRLLQEHSGIFGFSVSHTRALVEGYHEEPEARRGERQRLLLCNQGGDAA

SEQ ID NO: 183 - protein, 117 aa, Homo sapiens [sequence omitted]

SEQ ID NO: 184 - protein, 471 aa, Homo sapiens
MMMTFPASYPVSKLLDCVLGQEIGTVYNREKLLEMLRVTDPYNDLVKEELNIIQGALELRTKTVEDVMTPLRDCFMITGEAILDFNTMSEIMESGYTRIPVFEGERSNIVDLLFVKDLAFVDPDDCTPLKTITKFYNHPLHFVFNDTKLDAMLEEFKKGKSHLAIVQRVNNEGEGDPFYEVLGIVTLEDVIEEIIKSEILDETDLYTDNRTKKKVAHRERKQDFSAFKQTDSEMKVKISPQLLLAMHRFLATEVEAFSPSQMSEKILLRLLKHPNVIQELKYDEKNKKAPEYYLYQRNKPVDYFVLILQGKVEVEAGKEGMKFEASAFSYYGVMALTASPGENKSPPRPCGLNHSDSLSRSDRIDAVTPTLGSSNNQLNSSLLQVYIPDYSVRALSDLQFVKISRQQYQNALMASRMDKTPQSSDSENTKIELTLTELHDGLPDETANLLNEQNCVTHSKANHSLHNEGAI

SEQ ID NO: 185 - protein, 41 aa, Homo sapiens
MRMWPACCLILPRTVCTCCSLVYANWLHLLFLCLCPYPWLS

SEQ ID NO: 186 - protein, 100 aa, Homo sapiens
MRALTLLALLALAALCIAGQAGAKPSGAESSKGAAFVSKQEGSEVVKRPRRYLYQWLGAPVPYPDPLEPRREVCELNPDCDELADHIGFQEAYRRFYGPV

SEQ ID NO: 187 - protein, 213 aa, Homo sapiens
MAVPAVSGLSRQVRCFSTSVVRPFAKLVRPPVQVYGIEGRYATALYSAASKQNKLEQVEKELLRVAQILKEPKVAASVLNPYVKRSIKVKSLNDITAKERFSPLTTNLINLLAENGRLSNTQGVVSAFSTMMSVHRGEVPCTVTSASPLEEATLSELKTVLKSFLSQGQVLKLEAKTDPSILGGMIVRIGEKYVDMSVKTKIQKLGRAMREIV

SEQ ID NO: 188 - protein, 196 aa, Homo sapiens [sequence omitted]

SEQ ID NO: 189 - protein, 49 aa, Homo sapiens [sequence omitted]

SEQ ID NO: 190 - protein, 204 aa, Homo sapiens
MDRSAEFRKWKAQCLSKADLSRKGSVDEDVVELVQFLNMRDQFFTTSSCAGRILLLDRGINGFEVQKQNCCWLLVTHKLCVKDDVIVALKKANGDATLKFEPFVLHVQCRQLQDAQILHSMAIDSGFRNSGITVGKRGKTMLAVRSTHGLEVPLSHKGKLMVTEEYIDFLLNVANQKMEENKKRIERDGVLPCCLGWSQTPGLK

SEQ ID NO: 191 - protein, 104 aa, Homo sapiens
MGQCRSANAEDAQEFSDVERAIETLIKNFHQYSVEGGKETLTPSELRDLVTQQLPHLMPSNCGLEEKIANLGSCNDSKLEFRSFWELIGEAAKSVKLERPVRGH

SEQ ID NO: 192 - protein, 105 aa, Homo sapiens
MQTQAEALTAGMAGVATAAAGAWTQPQLRPVELPQRTRQVRAETPRLRQGVTNAAAHIHPQRAFPDPLGGGNRPWVPGTRCRAPPKGGWEGSHSEWQDPGRPLES

SEQ ID NO: 193 - protein, 268 aa, Homo sapiens
MGSAKSVPVTPARPPPHNKHLARVADPRSPSAGILRTPIQVESSPQPGLPAGEQLEGLKHAQDSDPRSPTLGIARTPMKTSSGDPPSPLVKQLSEVFETEDSKSNLPPEPVLPPEAPLSSELDLPLGTQLSVEEQMPPWNQTEFPSKQVFSKEEARQPTETPVASQSSDKPSRDPETPRSSGSMRNRWKPNSSKVLGRSPLTILQDDNSPGTLTLRQGKRPSPLSENVSELKEGAILGTGRLLKTGGRAWEQGQDHDKENQHFPLVES

SEQ ID NO: 194 - protein, 488 aa, Homo sapiens
MGSTEILEKETPENLSNGTSSNVEAAKRLAKRLYQLDRFKRSDVAKHLGKNNEFSKLVAEEYLKFFDFTGMTLDQSLRYFFKAFSLVGETQERERVLIHFSNRYFYCNPDTIASQDGVHCLTCAIMLLNTDLHGHNIGKKMTCQEFIANLQGVNEGVDFSKDLLKALYNSIKNEKLEWAVDDEEKKKSPSESTEEKANGTHPKTISRIGSTTNPFLDIPHDPNAAVYKSGFLARKIHADMDGKKTPRGKRGWKTFYAVLKGTVLYLQKDEYKPEKALSEEDLKNAVSVHHALASKATDYEKKPNVFKLKTADWRVLLFQTQSPEEMQGWINKINCVAAVFSAPPFPAAIGSQKKFSRPLLPATTTKLSQEEQLKSHESKLKQITTELAEHRSYPPDKKVKAKDVDEYKLKDHYLEFEKTRYEMYVSILKEGGKELLSNDESEAAGLKKSHSSPSLNPDTSPITAKVKRNVSERKDHRPETPSIKQKVT

SEQ ID NO: 195 - protein, 234 aa, Homo sapiens
MAASRWARKAVVLLCASDLLLLLLLLPPPGSCAAEGSPGTPDESTPPPRKKKKDIRDYNDADMARLLEQWEKDDDIEEGDLPEHKRPSAPVDFSKIDPSKPESILKMTKKGKTLMMFVTVSGSPTEKETEEITSLWQGSLFNANYDVQRFIVGSDRAIFMLRDGSYAWEIKDFLVGQDRCADVTLEGQVYPGKGGGSKEKNKTKQDKGKKKKEGDLKSRSSKEENRAGNKREDL

SEQ ID NO: 196 - protein, 144 aa, Homo sapiens
MACAAARSPADQDRFICIYPAYLNNKKTIAEGRRIPISKAVENPTATEIQDVCSAVGLNVFLEKNKMYSREWNRDVQYRGRVRVQLKQEDGSLCLVQFPSRKSVMLYAAEMIPKLKTRTQKTGGADQSLQQGEGSKKGKGKKKK

SEQ ID NO: 197 - protein, 492 aa, Homo sapiens
MDFLLGNPFSSPVGQRIEKATDGSLQSEDWALNMEICDIINETEEGPKDALRAVKKRIVGNKNFHEVMLALTVLETCVKNCGHRFHVLVASQDFVESVLVRTILPKNNPPTIVHDKVLNLIQSWADAFRSSPDLTGVVTIYEDLRRKGLEFPMTDLDMLSPIHTPQRTVFNSETQSGQDSVGTDSSQQEDSGQHAAPLPAPPILSGDTPIAPTPEQIGKLRSELEMVSGNVRVMSEMLTELVPTQAEPADLELLQELNRTCRAMQQRVLELIPQIANEQLTEELLIVNDNLNNVFLRHERFERFRTGQTTKAPSEAEPAADLIDMGPDPAATGNLSSQLAGMNLGSSSVRAGLQSLEASGRLEDEFDMFALTRGSSLADQRKEVKYEAPQATDGLAGALDARQQSTGAIPVTQACLMEDIEQWLSTDVGNDAEEPKGVTSEEFDKFLEERAKAADRLPNLSSPSAEGPPGPPSGPAPRKKTQEKDDDMLFAL

SEQ ID NO: 198 - protein, 59 aa, Homo sapiens
MTMELVSMIKTYPWQCMECKTCIICGQPHHEEEMMFCDMCDRGYHTFCVGLGAIPSGKD

SEQ ID NO: 199 - protein, 38 aa, Homo sapiens
MQEWLETRGSPKSHIDKANFNNEKVILKLDYSDFQIVK

SEQ ID NO: 200 - protein, 71 aa, Homo sapiens [sequence omitted]

SEQ ID NO: 201 - protein, 547 aa, Homo sapiens
MIADDKPAAMAGESAGQSSESGVGANFFGITFQTTETLMSTGHLNGAECKAGPGTVKTLAVEEEASRLWRKPDPYNTRREPDLRGGALDATGAQGGPLDRARKEPETACSHRRKSVAGQTPVGSNKKRNRVPGHVPAAGLTSAAATKERAQCSDTGGLDPYSAGHFSRATLLFCPPHTHRCISLTKSEKSERQQLFLPKPQSAVFGSEGRRTLRKLRRLSSPGAMDSDASLVSSRPSSPEPDDLFLPARSKGSSGSAFTGGTVSSSTPSDCPPELSAELRGAMGSAGAHPGDKLGGSGFKSSSSSTSSSTSSAAASSTKKDKKQMTEPELQQLRLKINSRERKRMHDLNIAMDGLREVMPYAHGPSVRKLSKIATLLLARNYILMLTNSLEEMKRLVSEIYGGHHAGFHPSACGGLAHSAPLPAATAHPAAAAHAAHHPAVHHPILPPAAAAAAAAAAAAAVSSASLPGSGLPSVGSIRPPHGLLKSPSAAAAAPLGGGGGGSGASGGFQHWGGMPCPCSMCQVPPPHHHVSAMGAGSLPRLTSDAK

SEQ ID NO: 202 - protein, 67 aa, Homo sapiens
MGHQQLYWSHPRKFGQGSRSCRVCSNRHGLIRKYGLNMCRQCFRQYAKDIGFIKKDLSCLPWHCLWR

SEQ ID NO: 203 - protein, 74 aa, Homo sapiens
MAYQLYRNTTLGNSLQESLDELIQGSLNTYRFCDNVWTFVLNDVEFREVTELIKVDKVKIVACDGKNTGSNTTE

SEQ ID NO: 204 - protein, 168 aa, Homo sapiens
MQDPKMQVYKDEQVVVIKDKYPKARYHWLVLPWTSISSLKAVAREHLELLKHMHTVGEKVIVDFAGSSKLRFRLGYHAIPSMSHVHLHVISQDFDSPCLKNKKHWNSFNTEYFLESQAVIEMVQEAGRVTVRDGMPELLKLPLRCHECQQLLPSIPQLKEHLRKHWTQ

SEQ ID NO: 205 - protein, 98 aa, Homo sapiens
MIPGGLSEAKPATPEIQEIVDKVKPQLEEKTNETYGKLEAVQYKTQVVAGTNYYIKVRAGDNKYMHLKVFKSLPGQNEDLVLTGYQVDKNKDDELTGF

SEQ ID NO: 206 - protein, 1108 aa, Homo sapiens [sequence omitted]

SEQ ID NO: 207 - protein, 125 aa, Homo sapiens
MARGPKKHLKRVAAPKHWMLDKLTGVFAPRPSTGPHKLRECLPLIIFLRNRLKYALTGDEVKKICMQRFIKIDGKVRTDITYPAGFMDVISIDKTGENFRLIYDTKGRFAVHRITPEEAKYNLCK

SEQ ID NO: 208 - protein, 137 aa, Homo sapiens
MSSLIRRVISTAKAPGAIGPYSQAVLVDRTIYISGQIGMDPSSGQLVSGGVAEEAKQALKNMGEILKAAGCDFTNVVKTTVLLADINDFNTVNEIYKQYFKSNFPARAAYQVAALPKGSRIEIEAVAIQGPLTTASL

SEQ ID NO: 209 - protein, 359 aa, Homo sapiens [sequence omitted]

SEQ ID NO: 210 - protein, 218 aa, Homo sapiens
MASRGGGRGRGRGQLTFNVEAVGIGKGDALPPPTLQPSPLFPPLEFRPVPLPSGEEGEYVLALKQELRGAMRQLPYFIRPAVPKRDVERYSDKYQMSGPIDNAIDWNPDWRRLPRELKIRVRKLQKERITILLPKRPPKTTEDKEETIQKLETLEKKEEEVTSEEDEEKEEEEEKEEEEEEEYDEEEHEEETDYIMSYFDNGEDFGGDSDDNMDEAIY

SEQ ID NO: 211 - protein, 61 aa, Homo sapiens
MDPNCSCSPVGSCACAGSCKCKECKCTSCKKSCCSCCPVGCAKCAQGCICKGTSDKCSCCA

SEQ ID NO: 212 - protein, 331 aa, Homo sapiens
MWLWEDQGGLLGPFSFLLLVLLLVTRSPVNACLLTGSLFVLLRVFSFEPVPSCRALQVLKPRDRISAIAHRGGSHDAPENTLAAIRQAAKNGATGVELDIEFTSDGIPVLMHDNTVDRTTDGTGRLCDLTFEQIRKLNPAANHRLRNDFPDEKIPTLREAVAECLNHNLTIFFDVKGHAHKATEALKKMYMEFPQLYNNSVVCSFLPEVIYKMRQTDRDVITALTHRPWSLSHTGDGKPRYDTFWKHFIFVMMDILLDWSMHNILWYLCGISAFLMQKDFVSPAYLKKWSAKGIQVVGWTVNTFDEKSYYESHLGSSYITDSMVEDCEPHF

SEQ ID NO: 213 - protein, 363 aa, Homo sapiens
MENEPVALEETQKTDPAMEPRFKVVDWDKNTASGCLTPRAEDWLSIHRDTLILTPIVCGRLGPTSITDEGTEGLREEKMHVQDLTAGQRHSQALMDLVDWRKPLLWQVGHLGEKYDEWVHQPVTRPIRLFHSDLIEGLSKTVWYSVPIIWVPLVLYLSWSYYRTFAQGNVRLFTSFTTEYTVAVPKSMFPGLFMLGTFLWSLIEYLIHRFLFHMKPPSDSYYLIMLHFVMHGQHHKAPFDGSRLVFPPVPASLVIGVFYLCMQLILPEAVGGTVFAGGLLGYVLYDMTHYYLHFGSPHKGSYLYSLKAHHVKHHFAHQKSGGSHPLGGQVALGDPLLPGASLPRAQPTGLLQAVATGSSRKGK

SEQ ID NO: 214 - protein, 193 aa, Homo sapiens
MLEVHIPSVGPEAEGPRQSPEKSHMVFRVEVLCSGRRHTVPRRYSEFHALHKRIKKLYKVPDFPSKRLPNWRTRGLEQRRQGLEAYIQGILYLNQEVPKELLEFLRLRHFPTDPKASNWGTLREFLPGDSSSQQHQRPVLSFHVDPYVCNPSPESLPNVVVNGVLQGLYSFSISPDKAQPKAACHPAPLPPMP

SEQ ID NO: 215 - protein, 444 aa, Homo sapiens
MRTLSTPSPALICPPNLPGFQNGRGSSTSSSSITGETVAMVHSPPPTRLTHPLIRLASRPQKEQASIDRLPDHSMVQIFSFLPTNQLCRCARVCRRWYNLAWDPRLWRTIRLTGETINVDRALKVLTRRLCQDTPNVCLMLETVTVSGCRRLTDRGLYTIAQCCPELRRLEVSGCYNISNEAVFDVVSLCPNLEHLDVSGCSKVTCISLTREASIKLSPLHGKQISIRYLDMTDCFVLEDEGLHTIAAHCTQLTHLYLRRCVRLTDEGLRYLVIYCASIKELSVSDCRFVSDFGLREIAKLESRLRYLSIAHCGRVTDVGIRYVAKYCSKLRYLNARGCEGITDHGVEYLAKNCTKLKSLDIGKCPLVSDTGLECLALNCFNLKRLSLKSCESITGQGLQIVAANCFDLQTLNVQDCEVSVEALRFVKRHCKRCVIEHTNPAFF

SEQ ID NO: 216 - protein, 99 aa, Homo sapiens
MSANRRWWVPPDDEDCVSEKLLRKTRESPLVPIGLGGCLVVAAYRIYRLRSRGSTKMSIHLIHTRVAAQACAVGAIMLGAVYTMYSDYVKRMAQDAGEK

SEQ ID NO: 217 - protein, 130 aa, Homo sapiens [sequence omitted]

SEQ ID NO: 218 - protein, 136 aa, Homo sapiens
MEFGLSWVFLVAILKGVQCEVQLVESGGGLVQPGGSLRLSCAASGFTFSSYWMHWVRQAPGKGLVWVSRINSDGSSTSYADSVKGRFTISRDNAKNTLYLQMNSLRAEDTAVYYCARDTVRGSQCEPRHKPRCRGI

SEQ ID NO: 219 - protein, 443 aa, Homo sapiens
MLLSAVCVMLNLAGSILSCQNAQLVNSLEGCQLIKFDSVEVCVCCELQHQSSGCSNLGETLKLNPLQENCNAVRLTLKDLLFSVCALNVLSTIVCALATAMCCMQMVSSDVLQMFLPQRSHPANPTCVTPHGTVLHQTLDFDEFIPPLPPPPYYPPEYTCTPSTEAQRGLHLDFAPSPFGTLYDVAINSPGLLYPAELPPPYEAVVGQPPASQVTSIGQQVAESSSGDPNTSAGFSTPVPADSTSLLVSEGTATPGSSPSPDGPVGAPAPSEPALPPGRVSPEDPGMGSQVQPGPGHVSRSTSDPTLCTSSMAGDASSHRPSCSQDLEAGLSEAVPGSASMSRSATAACRAQLSPAGDPDTWKTDQRPTPEPFPATSKERPRSLVDSKAYADARVLVAKFLEHSHCALPTEAQHMVGAMRLAVTNEERLEEEAVFGADVLDQV

SEQ ID NO: 220 - protein, 464 aa, Homo sapiens [sequence omitted]

SEQ ID NO: 221 - protein, 403 aa, Homo sapiens
MSFLTNDASSESIASFSKQEVMSSFLPEGGCYELLTVIGKGFEDLMTVNLARYKPTGEYVTVRRINLEACSNEMVTFLQGELHVSKLFNHPNIVPYRATFIADNELWVVTSFMAYGSAKDLICTHFMDGMNELAIAYILQGVLKALDYIHHMGYVHRSVKASHILISVDGKVYLSGLRSNLSMISHGQRQRVVHDFPKYSVKVLPWLSPEVLQQNLQGYDAKSDIYSVGITACELANGHVPFKDMPATQPRSWFCPPQMLLEKLNGTVPCLLDTSTIPAEELTMSPSRSVANSGLSDSLTTSTPRPSNGDSPSHPYHRTFSPHFHHFVEQCLQRNPDARPSASTLLNHSFFKQIKRRASEALPELLRPVTPITNFEGSQSQDHSGIFGLVTNLEELEVDDWEF

SEQ ID NO: 222 - protein, 958 aa, Homo sapiens
MHTCCPPVTLEQDLHRKMHSWMLQTLAFAVTSLVLSCAETIDYYGEICDNACPCEEKDGILTVSCENRGIISLSEISPPRFPIYHLLLSGNLLNRLYPNEFVNYTGASILHLGSNVIQDIETGAFHGLRGLRRLHLNNNKLELLRDDTFLGLENLEYLQVDYNYISVIEPNAFGKLHLLQVLILNDNLLSSLPNNLFRFVPLTHLDLRGNRLKLLPYVGLLQHMDKVVELQLEENPWNCSCELISLKDWLDSISYSALVGDVVCETPFRLHGRDLDEVSKQELCPRRLISDYEMRPQTPLSTTGYLHTTPASVNSVATSSSAVYKPPLKPPKGTRQPNKPRVRPTSRQPSKDLGYSNYGPSIAYQTKSPVPLECPTACSCNLQISDLGLNVNCQERKIESIAELQPKPYNPKKMYLTENYIAVVRRTDLLEATGLDLLHLGNNRISMIQDRAFGDLTNLRRLYLNGNRIERLSPELFYGLQSLQYLFLQYNLIREIQSGTFDPVPNLQLLFLNNNLLQAMPSGVFSGLTLLRLNLRSNHFTSLPVSGVLDQLKSLIQIDLHDNPWDCTCDIVGMKLWVEQLKVGVLVDEVICKAPKKFAETDMRSIKSELLCPDYSDVVVSTPTPSSIQVPARTSAVTPAVRLNSTGAPASLGAGGGASSVPLSVLILSLLLVFIMSVFVAAGLFVLVMKRRKKNQSDHTSTNNSDVSSFNMQYSVYGGGGGTGGHPHAHVHHRGPALPKVKTPAGHVYEYIPHPLGHMCKNPIYRSREGNSVEDYKDLHELKVTYSSNHHLQQQQQPPPPPQQPQQQPPPQLQLQPGEEERRESHHLRSPAYSVSTIEPREDLLSPVQDADRFYRGILEPDKHCSTTPAGNSLPEYPKFPCSPAAYTFSPNYDLRRPHQYLHPGAGDSRLREPVLYSPPSAVFVEPNRNEYLELKAKLNVEPDYLEVLEKQTTFSQF

SEQ ID NO: 223 - protein, 380 aa, Homo sapiens [sequence omitted]

SEQ ID NO: 224 - protein, 76 aa, Homo sapiens
MSKAHPPELKKFMDKKLSLKLNGGRHVQGILRGFDPFMNLVIDECVEMATSGQQNNIGMVVIRGNSIIMLEALERV

SEQ ID NO: 225 - protein, 579 aa, Homo sapiens
MNTAPSRPSPTRRDPYGFGDSRDSRRDRSPIRGSPRREPRDGRNGRDARDSRDIRDPRDLRDHRHSRDLRDHRDSRSVRDVRDVRDLRDFRDLRDSRDFRDQRDPMYDRYRDMRDSRDPMYRREGSYDRYLRMDDYCRRKDDSYFDRYRDSFDGRGPPGPESQSRAKERLKREERRREELYRQYFEEIQRRFDAERPVDCSVIVVNKQTKDYAESVGRKVRDLGMVVDLIFLNTEVSLSQALEDVSRGGSPFAIVITQQHQIHRSCTVNIMFGTPQEHRNMPQADAMVLVARNYERYKNECREKEREEIARQAAKMADEAILQERERGGPEEGVRGGHPPAIQSLINLLADNRYLTAEETDKIINYLRERKERLMRSSTDSLPGPISRQPLGATSGASLKTQPSSQPLQSGQVLPSATPTPSAPPTSQQELQAKILSLFNSGTVTANSSSASPSVAAGNTPNQNFSTAANSQPQQRSQASGNQPPSILGQGGSAQNMGPRPGAPSQGLFGQPSSRLAPASNMTSQRPVSSTGINFDNPSVQKALDTLIQSGPALSHLVSQTTAQMGQPQAPMGSYQRHY

SEQ ID NO: 226 - protein, 51 aa, Homo sapiens
MRSLLPRLECSGVIAAHCSLELLGSSDPPASASQSVGTTGVSHGTCLHQYS

SEQ ID NO: 227 - protein, 752 aa, Homo sapiens
MNGEYRGRGFGRGRFQSWKRGRGGGNFSGKWREREHRPDLSKTTGKRTSGDLIQEIGYKNGRLKEQKGNIEVTPQKVVIQEAATILMAKRLKEVLRLPECGNSKDEIERKGSILVDFKELTEGGEVTNLIPDIATELRDAPEKTLACMGLAIHQVLTKDLERHAAELQAQEGLSNDGETMVNVPHIHARVYNYEPLTQLKNVRANYYGKYIALRGTVVRVSNIKPLCTKMAFLCAACGEIQSFPLPDGKYSLPTKCPVPVCRGRSFTALRSSPLTVTMDWQSIKIQELMSDDQREAGRIPRTIECELVHDLVDSCVPGDTVTITGIVKVSNAEEGLALALFGGSQKYADDKNRIPIRGDPHILVVGDPGLGKSQMLQAACNVAPRGVYVCGNTTTTSGLTVTLSKDSSSGDFALEAGALVLGDQGICGIDEFDKMGNQHQALLEAMEQQSISLAKAGVVCSLPARTSIIAAANPVGGHYNKAKTVSENLKMGSALLSRFDLVFILLDTPNEHHDHLLSEHVIAIRAGKQRTISSATVARMNSQDSNTSVLEVVSEKPLSERLKVVPGETIDPIPHQLLRKYIGYARQYVYPRLSTEAARVLQDFYLELRKQSQRLNSSPITTRQLESLIRLTEARARLELREEATKEDAEDIVEIMKYSMLGTYSDEFGNLDFERSQHGSGMSNRSTAKRFISALNNVAERTYNNIFQFHQLRQIAKELNIQVADFENFIGSLNDQGYLLKKGPKVYQLQTM

SEQ ID NO: 228 - protein, 103 aa, Homo sapiens [sequence omitted]

SEQ ID NO: 229 - protein, 239 aa, Homo sapiens
MGHKPILLRTQYRCHPAISAIANDLFYKGALMNGVTEIERSPLLEWLPTLCFYNVKGLEQIERDNSFHNVAEATFTLKLIQSLIASGIAGSMIGVITLYKSQMYKLCHLLSAVDFHHPDIKTVQVSTVDAFQGAEKEIIILSCVRTRQVGFIDSEKRMNVALTRGKRHLLIVGNLACLRKNQLWGRVIQHCEGREDGLQHANQYEPQLNHLLKDYFEKQVEEKQKKKSEKEKSKDKSHS

SEQ ID NO: 230 - protein, 166 aa, Homo sapiens
MSEPQPRGAERDLYRDTWVRYLGYANEVGEAFRSLVPAAVVWLSYGVASSYVLADAIDKGKKAGEVPSPEAGRSARVTVAVVDTFVWQALASVAIPGFTINRVCAASLYVLGTATRWPLAVRKWTTTALGLLTIPIIIHPIDRSVDFLLDSSLRKLYPTVGKPSSS

SEQ ID NO: 231 - protein, 340 aa, Homo sapiens
MKYGNPNYGGMKGILSNSWKRRYHSRRIQRDVIKKRALIGDDVGLTSYKHRHSGLVNVPEEPIEEEEEEEEEEEEEEEEDQDMDADDRVVVEYHEELPALKQPRERSASRRSSASSSDSDEMDYDLELKMISTPSPKKSMKMTMYADEVESQLKNIRNSMRADSVSSSNIKNRIGNKLPPEKFADVRHLLDEKRQHSRPRPPVSSTKSDIRQRLGKRPHSPEKAFSSNPVVRREPSSDVHSRLGVPRQDSKGLYADTREKKSGNLWTRLGSAPKTKEKNTKKVDHRAPGAEEDDSELQRAWGALIKEKEQSRQKKSRLDNLPSLQIEVSRESSSGSEAES

SEQ ID NO: 232 - protein, 141 aa, Homo sapiens
MSNMRCVDCGTCLGHTRRHPTLFWGKTLPGLTPVAAPAPQPAQCPPGSEEDAPATQPGPQLAGPDPPWAPVFCRRLARAGHIELCNAVGCVLWSCPRSPGRGHAVGQGLEGGGGCPWATPPSLGGADFCNTKYSLWQKKCL

SEQ ID NO: 233 - protein, 662 aa, Homo sapiens
MEEIDMQQGTSSVKPQANGVLDEKSQIQEPCCSDLFLFPDESGNVSQESGPTYASFSHHFISDAMTGVPTENDDFCILFAPKAAMQEKEEEPVIKIMVDDAIVIRDNYFSLPVNKTDTSKAPLHFPIPVIRYVVKEVSLVWHLYGGKDFGTVPPTSPAKSYISPHSSPSHTPTRHGRNTVCGGKGRNHDFLMEIQLSKVKFQHEVYPPCKPDCDSSLSEHPVSRQVFIVQDLEIRDRLATSQMNKFLYLYCSKEMPRKAHSNMLTVKALHVCPESGRSPQECCLRVSLMPLRLNIDQDALFFLKDFFTSLSAEVELQMTPDPEVKKSPGADVTCSLPRHLSTSKEPNLVISFSGPKQPSQNDSANSVEVVNGMEEKNFSAEEASFRDQPVFFREFRFTSEVPIRLDYHGKHVSMDQGTLAGILIGLAQLNCSELKLKRLSYRHGLLGVDKLFSYAITEWLNDIKKNQLPGILGGVGPMHSLVQLVQGLKDLVWLPIEQYRKDGRIVRGFQRGAASFGTSTAMAALELTNRMVQTIQAAAETAYDMVSPGTLSIEPKKTKRFPHHRLAHQPVDLREGVAKAYSVVKEGITDTAQTIYETAAREHESRGVTGAVGEVLRQIPPAVVKPLIVATEATSNVLGGMRNQIRPDVRQDESQKWRHGDD

SEQ ID NO: 234 - protein, 448 aa, Homo sapiens
MKGGTLGGIPGEPAVDHRDVDELLEFINSTEPKVPNSARAAKRARHKLKKKEKEKAQLAAEALKQANRVSGSREPRPARERLLEWPDRELDRVNSFLSSRLQEIKNTVKDSIRASFSVCELSMDSNGFSKEGAAEPEPQSLPPSNLSGSSEQQPDINLDLSPLTLGSPQNHTLQAPGEPAPPWAEMRGPHPPWTEVRGPPPGIVPENGLVRRLNTVPNLSRVIWVKTPKPGYPSSEEPSSKEVPSCKQELPEPVSSGGKPQKGKRQGSQAKKSEASPAPRPPASLEVPSAKGQVAGPKQPGRVLELPKVGSCAEAGEGSRGSRPGPGWAGSPKTEKEKGSSWRNWPGEAKARPQEQESVQPPGPARPQSLPQGKGRSRRSRNKQEKPASSLDDVFLPKDMDGVEMDETDREVEYFKRFCLDSAKQTRQKVAVNWTNFSLKKTTPSTAQ

SEQ ID NO: 235 - protein, 770 aa, Homo sapiens
MSKCRKTPVQQLASPASFSPDILADIFELFAKNFSYGKPLNNEWQLPDPSEIFTCDHTEFNAFLDLKNSLNEVKNLLSDKKLDEWHEHTAFTNKAGKIISHVRKSVNAELCTQAWCKFHEILCSFPLIPQEAFQNGKLNSLHLCEAPGAFIASLNHYLKSHRFPCHWSWVANTLNPYHEANDDLMMIMDDRLIANTLHWWYFGPDNTGDIMTLKFLTGLQNFISSMATVHLVTADGSFDCQGNPGEQEALVSSLHYCEVVTALTTLGNGGSFVLKMFTMFEHCSINLMYLLNCCFDQVHVFKPATSKAGNSEVYVVCLHYKGREAIHPLLSKMTLNFGTEMKRKALFPHHVIPDSFLKRHEECCVFFHKYQLETISENIRLFECMGKAEQEKLNNLRDCAIQYFMQKFQLKHLSRNNWLVKKSSIGCSTNTKWFGQRNKYFKTYNERKMLEALSWKDKVAKGYFNSWAEEHGVYHPGQSSILEGTASNLECHLWHILEGKKLPKVKCSPFCNGEILKTLNEAIEKSLGGAFNLDSKFRPKQQYSCSCHVFSEELIFSELCSLTECLQDEQVVVPSNQIKCLLVGFSTLRNIKMHIPLEVRLLESAELTTFSCSLLHDGDPTYQRLFLDCLLHSLRELHTGDVMILPVLSCFTRFMAGLIFVLHSCFRFITFVCPTSSDPLRTCAVLLCVGYQDLPNPVFRYLQSVNELLSTLLNSDSPQQVLQFVPMEVLLKGALLDFLWDLNAAIAKRHLHFIIQREREEIINSLQLQN

SEQ ID NO: 236 - protein, 690 aa, Homo sapiens
MPWEEPAGEKPSCSHSQKAFHMEPAQKPCFTTDMVTWALLCISAETVRGEAPSQPRGIPHRSPVSVDDLWLEKTQRKKLQKQAHIERRLHIGAVHKDGVKCWRKTIITSPESLNLPRRSHPLSQSAPTGLNHMGWPEHTPGTAMPDGALDTAVCADEVGSEEDLYDDLHSSSHHYSHPGGGGEQLAINELISDGSVVCAEALWDHVTMDDQELGFKAGDVIEVMDATNREWWWGRVADGEGWFPASFVRLRVNQDEPADDDAPLAGNSGAEDGGAEAQSSKDQMRTNVINEILSTERDYIKHLRDICEGYVRQCRKRADMFSEEQLRTIFGNIEDIYRCQKAFVKALEQRFNRERPHLSELGACFLEHQADFQIYSEYCNNHPNACVELSRLTKLSKYVYFFEACRLLQKMIDISLDGFLLTPVQKICKYPLQLAELLKYTHPQHRDFKDVEAALHAMKNVAQLINERKRRLENIDKIAQWQSSIEDWEGEDLLVRSSELIYSGELTRVTQPQAKSQQRMFFLFDHQLIYCKKDLLRRDVLYYKGRLDMDGLEVVDLEDGKDRDLHVSIKNAFRLHRGATGDSHLLCTRKPEQKQRWLKAFAREREQVQLDQETGFSITELQRKQAMLNASKQQVTGKPKAVGRPCYLTRQKHPALPSNRPQQQVLVLAEPRRKPSTFWHSISRLAPFRK

SEQ ID NO: 237 - protein, 86 aa, Homo sapiens
MEPLKFRDVAIEFSLEEWQCLDTIQQNLYRNVMLENYRNLVFLGIVVSKPDLITCLEQEKEPWTRKRHRMVAEPPGSLSVTQAGVQ

SEQ ID NO: 238 - protein, 432 aa, Homo sapiens
MEERAFVNPFPDYEAAAGALLASGAAEETGCVRPPATTDEPGLPFHQDGKIIHNFIRRIQTKIKDLLQQMEEGLKTADPHDCSAYTGWTGIALLYLQLYRVTCDQTYLLRSLDYVKRTLRNLNGRRVTFLCGDAGPLAVGAVIYHKLRSDCESQECVTKLLQLQRSVVCQESDLPDELLYGRAGYLYALLYLNTEIGPGTVCESAIKEVVNAIIESGKTLSREERKTERCPLLYQWHRKQYVGAAHGMAGIYYMLMQPAAKVDQETLTEMVKPSIDYVRHKKFRSGNYPSSLSNETDRLVHWCHGAPGVIHMLMQAYKVFKEEKYLKEAMECSDVIWQRGLLRKGYGICHGTAGNGYSFLSLYRLTQDKKYLYRACKFAEWCLDYGAHGCRIPDRPYSLFEGMAGAIHFLSDVLGPETSRFPAFELDSSKRD

SEQ ID NO: 239 - protein, 640 aa, Homo sapiens
MVSNPVHGLPFLPGTSFKDSTKTAFHRSQTLSYRNGYAIVRRPTVGIGGDRLQFNQLSQAELDELASKAPVLTYGQPKQAPPADFIPAHVAFDKKVLKFDAYFQEDVPMSTEEQYRIRQVNIYYYLEDDSMSVIEPVVENSGILQGKLIKRQRLAKNDRGDHYHWKDLNRGINITIYGKTFRVVDCDQFTQVFLESQGIELNPPEKMALDPYTELRKQPLRKYVTPSDFDQLKQFLTFDKQVLRFYAIWDDTDSMYGECRTYIIHYYLMDDTVEIREVHERNDGRDPFPLLMNRQRVPKVLVENAKNFPQCVLEISDQEVLEWYTAKDFIVGKSLTILGRTFFIYDCDPFTRRYYKEKFGITDLPRIDVSKREPPPVKQELPPYNGFGLVEDSAQNCFALIPKAPKKDVIKMLVNDNKVLRYLAVLESPIPEDKDRRFVFSYFLATDMISIFEPPVRNSGIIGGKYLGRTKVVKPYSTVDNPVYYGPSDFFIGAVIEVFGHRFIILDTDEYVLKYMESNAAQYSPEALASIQNHVRKREAPAPEAESKQTEKDPGVQELEALIDTIQKQLKDHSCKDNIREAFQIYDKEASGYVDRDMFFKICESLNVPVDDSLVKELIRMCSHGEGKINYYNFVRAFSN

SEQ ID NO: 240 - protein, 340 aa, Homo sapiens
MTSYRERSADLARFYTVTEPQRHPRGYTVYKVTARVVSRRNPQDVQEIIVWNRYTVFNKLHLELWLIHKNLFRHSELFPPFAKGIVFGRFDETVIEERRQCAEDLLQFSANIPALYNSKQLEDFFKGGIINDSSELIGPAEAHSDSLIDTFPECSTEGFSSDSDLVSLTVDVDSLAELDDGMASNQNSPIRTFGLNLSSDSSALGAVASDSEQSKTEEERESRSLFPGSLKPKLGKRDYLEKAGELIKLALKKEEEDDYEAASDFYRKGVDLLLEGVQGESSPTRREAVKRRTAEYLMRAESISSLYGKPQLDDVSQVCLIFCCVFSSVIFCCLVSLLYF

SEQ ID NO: 241 - protein, 81 aa, Homo sapiens
MSLNLGRHNSSVCSKRTVSQKLELPLEAQTPENTQGGTLPVDVLGKEEGRGDRGQDSALWWVLRVPTRGSQDLGNRSATLV

SEQ ID NO: 242 - protein, 152 aa, Homo sapiens
MREKLIRLQSLYIDQFKRLQHLLKEKKRRYLHNRKVEHEALGSSLLTGPEGLLAKERENLKRLKCLRRYRQRYGVEALLHRQLKERRMLATDGAAQQAHTTRSSQRCLAFVDDVRCSNQSLPMTRHCLTQKDATAIGDLLTLYCGLMETALD

SEQ ID NO: 243 - protein, 434 aa, Homo sapiens [sequence omitted]

SEQ ID NO: 244 - protein, 680 aa, Homo sapiens
MNSDDPVVQQKAVLETEKRLLLMEEDQEEDECRTTLNKTMISPPQTAMKSAEEINSEAFLASVEKDAKERAKRRRENKVLADALKEKGNEAFAEGNYETAILRYSEGLEKLKDMKVLYTNRAQAYMKLEDYEKALVDCEWALKCDEKCTKAYFHMGKANLALKNYSVSRECYKKILEINPKLQTQVKGYLNQVDLQEKADLQEKEAHELLDSGKNTAVTTKNLLETLSKPDQIPLFYAGGIEILTEMINECTEQTLFRMHNGFSIISDNEVIRRCFSTAGNDAVEEMVCVSVLKLWQAVCSRNEENQRVLVIHHDRARLLAALLSSKVLAIRQQSYALLLHLAQTESGRSLIINHLDLTRLLEALVSFLDFSDKEANTAMGLFTDLALEERFQVWFQANLPGVLPALTGVLKTDPKVSSSSALCQCIAIMGNLSAEPTTRRHMAACEEFGDGCLSLLARCEEDVDLFREVIYTLLGLMMNLCLQAPFVSEVWAVEVSRRCLSLLNSQDGGILTRAAGVLSRTLSSSLKIVEEALRAGVVKKMMKFLKTGGETASRYAIKILAICTNSYHEAREEVIRLDKKLSVMMKLLSSEDEVLVGNAALCLGNCMEVPNVASSLLKTDLLQVLLKLAGSDTQKTAVQVNAGIALGKLCTAEPRFAAQLRKLHGLEILNSTMKYISDS

SEQ ID NO: 245 - protein, 141 aa, Homo sapiens
METAGAATGQPASGLEAPGSTNDRLFLVKGGIFLGTVAAAGMLAGFITTLSLAKKKSPEWFNKGSMATAALPESGSSLALRALGWGSLYAWCGVGVISFAVWKALGVHSMNDFRSKMQSIFPTIPKNSESAVEWEETLKSK

SEQ ID NO: 246 - protein, 446 aa, Homo sapiens
METQADLVSQEPQALLDSALPSKVPAFSDKDSLGDEMLAAALLKAKSQELVTFEDVAVYFIRKEWKRLEPAQRDLYRDVMLENYGNVFSLDRETRTENDQEISEDTRSHGVLLGRFQKDISQGLKFKEAYEREVSLKRPLGNSPGERLNRKMPDFGQVTVEEKLTPRGERSEKYNDFGNSFTVNSNLISHQRLPVGDRPHKCDECSKSFNRTSDLIQHQRIHTGEKPYECNECGKAFSQSSHLIQHQRIHTGEKPYECSDCGKTFSCSSALILHRRIHTGEKPYECNECGKTFSWSSTLTHHQRIHTGEKPYACNECGKAFSRSSTLIHHQRIHTGEKPYECNECGKAFSQSSHLYQHQRIHTGEKPYECMECGGKFTYSSGLIQHQRIHTGENPYECSECGKAFRYSSALVRHQRIHTGEKPLNGIGMSKSSLRVTTELNIREST

SEQ ID NO: 247 - protein, 577 aa, Homo sapiens
MLTPAFDLSQDPDFLTIAIRVPYARVSEFDVYFEGSDFKFYAKPYFLRLTLPGRIVENGSEQGSYDADKGIFTIRLPKETPGQHFEGLNMLTALLAPRKSRTAKPLVEEIGASEIPEEVVDDEEFDWEIEQTPCEEVSESALNPQCHYGFGNLRSGVLQRLQDELSDVIDIKDPDFTPAAERRQKRLAAELAKFDPDHYLADFFEDEAIEQILKYNPWWTDKYSKMMAFLEKSQEQENHATLVSFSEEEKYQLRKFVNKSYLLDKRACRQVCYSLIDILLAYCYETRVTEGEKNVESAWNIRKLSPTLCWFETWTNVHDIMVSFGRRVLCYPLYRHFKLVMKAYRDTIKILQLGKSAVLKCLLDIHKIFQENDPAYILNDLYITDYCVYIQKVKSKKLAALAEALKEVSLTKAQLGLELEELEAAALLVQEEETALKAAHSVSGQQTLCSSSEASDSEDSDSSVSSGNEDSGSDSEQDELKDSPSETVSSLQGPFLEESSAFLIVDGGVRRNTAIQESDASQGKPLASSWPLGVSGPLIEELGEQLKTTVQVSEPKGTTAVNRSNIQERDGCQTPNN

SEQ ID NO: 248 - protein, 471 aa, Homo sapiens
MSRIPASSNSTSSKLTHINNSRVPKKLKKPAKPLLSKIKLRNHCKRLEQKNASRKLEMGNLVLKEPKVVLYKNLPIKKDKEPEGPAQAAVASGCLTRHAAREHRQNPVRGAHSQGESSPCTYITRRSVRTRTNLKEASDIKLEPNTLNGYKSSVTEPCPDSGEQLQPAPVLQEEELAHETAQKGEAKCHKSDTGMSKKKSRQGKLVKQFAKIEESTPVHDSPGKDDAVPDLMGPHSDQGEHSGTVGVPVSYTDCAPSPVGCSVVTSDSFKTKDSFRTAKSKKKRRITRYDAQLILENNSGIPKLTLRRRHDSSSKTNDQENDGMNSSKISIKLSKDHDNDNNLYVAKLNNGFNSGSGSSSTKLKIQLKRDEENRGSYTEGLHENGVCCSDPLSLLESRMEVDDYSQYEEESTDDSSSSEGDEEEDDYDDDFEDDFIPLPPAKRLRLIVGKDSIDIDISSRRREDQSLRLNA

SEQ ID NO: 249 - protein, 166 aa, Homo sapiens
MAMSQESLTFKDVFVDFTLEEWQQLDSAQKNLYRDVMLENYSHLVSVGYLVAKPDVIFRLGPGGESWMADGGTPVRTCAEVWQVDEQIDHYKESQDKLPWQAAFIGKETLKDESGQESRTCRKSIYLSTEFDSVRQRLPKYYSWEKAFKTSFKLSWSKWKLCKKER

SEQ ID NO: 250 - protein, 708 aa, Homo sapiens
MQKMIPASQRAVTSPGQALSTVVKPLLQNTVDKILEALQRVFPHAEFRTNKTLDSDISCPLLESDLAYSDDDVPSVYENGLSQKSSHKAKDNFNFLHLNRNACYQPMSFRPRILIVGEPGFGQGSHLAPAVIHALEKFTVYTLDIPVLFGVSTTSPEETCAQVIREAKRTAPSIVYVPHIHVWWEIVGPTLKATFTTLLQNIPSFAPVLLLATSDKPHSALPEEVQELFIRDYGEIFNVQLPDKEERTKFFEDLILKQAAKPPISKKKAVLQALEVLPVAPPPEPRSLTAEEVKRLEEQEEDTFRELRIFLRNVTHRLAIDKRFRVFTKPVDPDEVPDYVTVIKQPMDLSSVISKIDLHKYLTVKDYLRDIDLICSNALEYNPDRDPGDRLIRHRACALRDTAYAIIKEELDEDFEQLCEEIQESRKKRGCSSSKYAPSYYHVMPKQNSTLVGDKRSDPEQNEKLKTPSTPVACSTPAQLKRKIRKKSNWYLGTIKKRRKISQAKDDSQNAIDHKIESDTEETQDTSVDHNETGNTGESSVEENEKQQNASESKLELRNNSNTCNIENELEDSRKTTACTELRDKIACNGDASSSQIIHISDENEGKEMCVLRMTRARRSQVEQQQLITVEKALAILSQPTPSLVVDHERLKNLLKTVVKKSQNYNIFQLENLYAVISQCIYRHRKDHDKTSLIQKMEQEVENFSCSR

SEQ ID NO: 251 - protein, 518 aa, Homo sapiens
MTASPDYLVVLFGITAGATGAKLGSDEKELILLFWKVVDLANKKVGQLHEVLVRPDQLELTEDCKEETKIDVESLSSASQLDQALRQFNQSVSNELNIGVGTSFCLCTDGQLHVRQILHPEASKKNVLLPECFYSFFDLRKEFKKCCPGSPDIDKLDVATMTEYLNFEKSSSVSRYGASQVEDMGNIILAMISEPYNHRFSDPERVNYKFESGTCSKMELIDDNTVVRARGLPWQSSDQDIARFFKGLNIAKGGAALCLNAQGRRNGEALVRFVSEEHRDLALQRHKHHMGTRYIEVYKATGEDFLKIAGGTSNEVAQFLSKENQVIVRMRGLPFTATAEEVVAFFGQHCPITGGKEGILFVTYPDGRPTGDAFVLFACEEYAQNALRKHKDLLGKRYIELFRSTAAEVQQVLNRFSSAPLIPLPTPPIIPVLPQQFVPPTNVRDCIRLRGLPYAATIEDILDFLGEFATDIRTHGVHMVLNHQGRPSGDAFIQMKSADRAFMAAQKCHKKKHEGQIC

SEQ ID NO: 252 - protein, 89 aa, Homo sapiens
MSDRKAVIKNADMSEDMQQDAVDCATQAMEKYNIEKDIAAYIKKEFDKKYNPTWHCIVGRNFGSYVTHETKHFIYFYLGQVAILLFKSG

SEQ ID NO: 253 - protein, 94 aa, Homo sapiens [sequence omitted]

SEQ ID NO: 254 - protein, 207 aa, Homo sapiens
MPEGPLVRKFHHLVSPLVGQQVVKTGGSSKKLQPASLQSLWLQDTQVHGKKLFLRFDLDEEMGPPGSSPTPEPPQKEVQKEGAADPKQVGEPSGQKTLDGSSRSAELVPQGEDDSEYLERDAPAGDAGRWLRVSFGLFGSVWVNDFSRAKKANKRGDWRDPSPRLVLHFGGGGFLAFYNCQLSWSSSPVVTPTCDILSEKFHRGQAL

SEQ ID NO: 255 - protein, 279 aa, Homo sapiens
MAALGRPFSGLPLSGGSDFLQPPQPAFPGRAFPPGADGAELAPRPGPRAVPSSPAGSAARGRVSVHCKKKHKREEEEDDDCPVRKKRITEAELCAGPNDWILCAHQDVEGHGVNPSVSGLSIPGILDVICEEMDQTTGEPQCEVARRKLQEIEDRIIDEDEEVEADRNVNHLPSLVLSDTMKTGLKREFDEVFTKKMIESMSRPSMELVLWKPLPELLSDKPKPSSNTKNYTGESQAKHVAAGTAFPQRTELFSEPRPTGMSLYNSLETATSTEEEMEL

SEQ ID NO: 256 - protein, 141 aa, Homo sapiens
MTLKMQYLFLSFFLSFFLRQELRPVAQAGVLECSGAISAHCSLCFPGSSVSPASAFRVAGITGMYHYAWLIFISIFLVEMGFHHVCQAGLELLASSDPPTSASQSAGITGASHRAWPKMQILVWIYALPLPSIFLSVALLA

SEQ ID NO: 257 - protein, 58 aa, Homo sapiens
MQREDGTPSMGCPLTLPDSSDLRFLAFEPAPPTLPSARPRLLQASVTLSLKERAPLIL

SEQ ID NO: 258 - protein, 1444 aa, Homo sapiens
MKNKGAKQKLKRKGAASAFGCDLTEYLESSGQDVPYVLKSCAEFIETHGIVDGIYRLSGVTSNIQRLRQEFGSDQCPDLTREVYLQDIHCVGSLCKLYFRELPNPLLTYELYEKFTEAVSHCPEEGQLARIQNVIQELPPSHYRTLEYLIRHLAHIASFSSKTNMHARNLALVWAPNLLRSKEIEATGCNGDAAFLAVRVQQVVIEFILNHVDQIFNNGAPGSLENDENRPIMKSLTLPALSLPMKLVSLEEAQARSLATNHPARKERRENSLPEIVPPMGTLFHTVLELPDNKRKLSSKSKKWKSIFNLGRSGSDSKSKLSRNGSVFVRGQRLSVEKATIRPAKSMDSLCSVPVEGKETKGNFNRTVTTGGFFIPATKMHSTGTGSSCDLTKQEGEWGQEGMPPGAEGGFDVSSDRSHLQGAQARPPPEQLKVFRPVEDPESEQTAPKMLGMFYTSNDSPSKSVFTSSLFPMEPSPRNQRKALNISEPFAVSVPLRVSAVISTNSTPCRTPPKELQSLSSLEEFSFHGSESGGWPEEEKPLGAETSAASVPKKAGLEDAKAVPEAPGTVECSKGLSQEPGAHLEEKKTPESSLSSQHLNELEKRPNPEKVVEEGREAGEMESSTLQESPRARAEAVLLHEMDEDDLANALIWPEIQQELKIIESEEELSSLPPPALKTSPIQPILESSLGPFIPSEPPGSLPCGSFPAPVSTPLEVWTRDPANQSTQGASTAASREKPEPEQGLHPDLASLAPLEIVPFEKASPQATVEVGGPGNLSPPLPPAPPPPTPLEESTPVLLSKGSPEREDSSRKLRTDLYIDQLKSQDSPEISSLCQGEEATPRHSDKQNSKNAASEGKGCGFPSPTREVEIVSQEEEDVTHSVQEPSDCDEDDTVTDIAQHGLEMVEPWEEPQWVTSPLHSPTLKDAHKAQVQGLQGHQLEKRLSHRPSLRQSHSLDSKPTVKSQWTLEVPSSSSCANLETERNSDPLQPQAPRREITGWDEKALRSFREFSGLKGAEAPPNQKGPSGVQPNPAETSPISLAEGKELGTHLGHSSPQIRQGGVPGPESSKESSPSVQDSTSPGEHPAKLQLKSTECGPPKGKNRPSSLNLDPAIPIADLFWFENVASFSSPGMQVSEPGDPKVTWMTSSYCKADPWRVYSQDPQDLDIVAHALTGRRNSAPVSVSAVRTSFMVKMCQARAVPVIPPKIQYTQIPQPLPSQSSGENGVQPLERSQEGPSSTSGTTQKPAKDDSPSSLESSKEEKPKQDPGAIKSSPVDATAPCMCEGPTLSPEPGSSNLLSTQDAVVQCRKRMSETEPSGDNLLSSKLERPSGGSKPFHRSRPGRPQSLILFSPPFPIMDHLPPSSTVTDSKVLLSPIRSPTQTVSPGLLCGELAENTWVTPEGVTLRNKMTIPKNGQRLETSTSCFYQPQRRSVILDGRSGRQIE

SEQ ID NO: 259 - protein, 167 aa, Homo sapiens
MRHKHPLELHRSCALLSSGISLENSSQQLMEVSPVHRLCMDFAQVPFPSCADTCIFGLHVSTCPLHSDFFFKRQHLTLSPRLEYSGVITAHCSLKLLGSGNPPASASRVAGSTGACHHAHLIFLSFIDTGLTVAQAGLELLASSDPPALAYQNAGIIGMNHCAWPSL

SEQ ID NO: 260 - protein, 294 aa, Homo sapiens
MEKAKGKEWTSTEKSREEDQQASNQPNSIALPGTSAKRTKEKMSVKGSKVLCPKKKAEHTDNPRPQKKIPIPPLPSKLPPVNLIHRDILRAWCQQLKLSSKGQKLDAYKRLCAFAYPNQKDFPSTAKEAKIRKSLQKKLKVEKGETSLQSSETHPPEVALPPVGEPPALENSTALLEGVNTVVVTTSAPEALLASWARISARARTPEAVESPQEASGVRWCVVHGKSLPADTDGWVHLQFHAGQAWVPEKQEGRVSALFLLPASNFPPPHLEDNMLCPKCVHRNKVLIKSLQWE

SEQ ID NO: 261 - protein, 48 aa, Homo sapiens
MMPPGDQGGPGAPAFCENHLGQSFRGGGKSLGPSLPGSPLQGHGFTNM

SEQ ID NO: 262 - protein, 157 aa, Homo sapiens
MSGSLGRAAAALLRWGRGAGGGGLWGPGVRAAGSGAGGGGSAEQLDALVKKDKVVVFLKGTPEQPQCGFSNAVVQILRLHGVRDYAAYNVLDDPELRQGIKDYSNWPTIPQVYLNGEFVGGCDILLQMHQNGDLVEELKKLGIHSALLDEKKDQDSK

SEQ ID NO: 263 - protein, 997 aa, Homo sapiens
MEEMFHKKSEAVRRLVEAAEEAHLKHEFDADLQYEYFNAVLINERDKDGNFLELGKEFILAPNDHFNNLPVNISLSDVQVPTNMYNKDPAIVNGVYWSESLNKVFVDNFDRDPSLIWQYFGSAKGFFRQYPGIKWEPDENGVIAFDCRNRKWYIQAATSPKDVVILVDVSGSMKGLRLTIAKQTVSSILDTLGDDDFFNIIAYNEELHYVEPCLNGTLVQADRTNKEHFREHLDKLFAKGIGMLDIALNEAFNILSDFNHTGQGSICSQAIMLITDGAVDTYDTIFAKYNWPDRKVRIFTYLIGREAAFADNLKWMACANKGFFTQISTLADVQENVMEYLHVLSRPKVIDQEHDVVWTEAYIDSTLPQAQKLTDDQGPVLMTTVAMPVFSKQNETRSKGILLGVVGTDVPVKELLKTIPKYKLGIHGYAFAITNNGYILTHPELRLLYEEGKKRRKPNYSSVDLSEVEWEDRDDVLRNAMVNRKTGKFSMEVKKTVDKGKRVLVMTNDYYYTDIKGTPFSLGVALSRGHGKYFFRGNVTIEEGLHDLEHPDVSLADEWSYCNTDLHPEHRHLSQLEAIKLYLKGKEPLLQCDKELIQEVLFDAVVSAPIEAYWTSLALNKSENSDKGVEVAFLGTRTGLSRINLFVGAEQLTNQDFLKAGDKENIFNADHFPLWYRRAAEQIPGSFVYSIPFSTGPVNKSNVVTASTSIQLLDERKSPVVAAVGIQMKLEFFQRKFWTASRQCASLDGKCSISCDDETVNCYLIDNNGFILVSEDYTQTGDFFGEIEGAVMNKLLTMGSFKRITLYDYQAMCRANKESSDGAHGLLDPYNAFLSAVKWIMTELVLFLVEFNLCSWWHSDMTAKAQKLKQTLEPCDTEYPAFVSERTIKETTGNIACEDCSKSFVIQQIPSSNLFMVVVDSSCLCESVAPITMAPIEIRYNESLKCERLKAQKIRRRPESCHGFHPEENARECGGAPSLQAQTVLLLLPLLLMLFSR

SEQ ID NO: 264 - protein, 449 aa, Homo sapiens
MPATLLRAVARSHHILSKAHQCRRIGHLMLKPLKEFENTTCSTLTIRQSLDLFLPDKTASGLNKSQILEMNQKKSDTSMLSPLNAARCQDEKAHLPTMKSFGTHRRVTHKPNLLGSKWFIKILKRHFSSVSTETFVPKQDFPQVKRPLKASRTRQPSRTNLPVLSVNEDPMHCTAFATADEYHLGNLSQDLASHGYVEVTSLPRDAANILVMGVENSAKEGDPGTIFFFREGAAVFWNVKDKTMKHVMKVLEKHEIQPYEIALVHWENEELNYIKIEGQSKLHRGEIKLNSELDLDDAILEKFAFSNALCLSVKLAIWEASLDKFIESIQSIPEALKAGKKVKLSHEEVMQKIGELFALRHRINLSSDFLITPDFYWDRENLEGLYDKTCQFLSIGRRVKVMNEKLQHCMELTDLMRNHLNEKRALRLEWMIVILITIEVMFELGRVFF

SEQ ID NO: 265 - protein, 838 aa, Homo sapiens
MPAERPAGSGGSEAPAMVEQLDTAVITPAMLEEEEQLEAAGLERERKMLEKARMSWDRESTEIRYRRLQHLLEKSNIYSKFLLTKMEQQQLEEQKKKEKLERKKESLKVKKGKNSIDASEEKPVMRKKRGREDESYNISEVMSKEEILSVAKKNKKENEDENSSSTNLCVEDLQKNKDSNSIIKDRLSETVRQNTKFFFDPVRKCNGQPVPFQQPKHFTGGVMRWYQVEGMEWLRMLWENGINGILADEMGLGKTVQCIATIALMIQRGVPGPFLVCGPLSTLPNWMAEFKRFTPDIPTMLYHGTQEERQKLVRNIYKRKGTLQIHPVVITSFEIAMRDRNALQHCYWKYLIVDEGHRIKNMKCRLIRELKRFNADNKLLLTGTPLQNNLSELWSLLNFLLPDVFDDLKSFESWFDITSLSETAEDIIAKEREQNVLHMLHQILTPFLLRRLKSDVALEVPPKREVVVYAPLSKKQEIFYTAIVNRTIANMYGSSEKETIELSPTGRPKRRTRKSINNSKIDEFPNELEKLISQIQPEVDRERAVVEVNIPVESEVNLKLQNIMMLLRKCCNHPYLIEYPIDPVTQEFKIDEELVTNSGKFLILDRMLPELKKRGHKVLLFSQMTSMLDILMDYCHLRDFNFSRLDGSMSYSEREKNMHSFNTDPEVFIFLVSTRAGGLGINLTAADTVIIYDSDWNPQSDLQAQDRCHRIGQTKPVVVYRLVTANTIDQKIVERAAAKRKLEKLIIHKNHFKGGQSGLNLSKNFLDPKELMELLKSRDYEREIKGSREKVISDKDLELLLDRSDLIDQMNASGPIKEKMGIFKILENSEDSSPECLF

SEQ ID NO: 266 - protein, 402 aa, Homo sapiens
MYTSEEKCNQRTQKRKIYNVCPRKGKKIFIHMHEIIQIDGHIYQCLECKQNFCENLALIMCERTHTGEKPYKCDMCEKTFVQSSDLTSHQRIHNYEKPYKCSKCEKSFWHHLALSGHQRTHAGKKFYTCDICGKNFGQSSDLLVHQRSHTGEKPYLCSECDKCFSRSTNLIRHRRTHTGEKPFKCLECEKAFSGKSDLISHQRTHTGERPYKCNKCEKSYRHRSAFIVHKRVHTGEKPYKCGACEKCFGQKSDLIVHQRVHTGEKPYKCLECMRSFTRSANLIRHQATHTHTFKCLEYEKSFNCSSDLIVHQRIHMEEKPHQWSACESGFLLGMDFVAQQKMRTQTEELHYKYTVCDKSFHQSSALLQHQTVHIGEKPFVCNVSEKGLELSPPHASEASQMS

SEQ ID NO: 267 - protein, 579 aa, Homo sapiens
MAFGGNFLHNLNIGMQLRCYEMEKRLKTPDLFKFPFFEAICWFVAKNLLETLKELREDGFQPQTYLVQGVKALHTALKLWMKKELVSEHAFEIPDNVRPGHLIKELSKVIRAIEEENGKPVKSQGIPIVCPVSRSSNEATSPYHSRRKMRKLRDHNVRTPSNLDILELHTREVLKRLEMCPWEEDILSSKLNGKFNKHLQPSSTVPEWRAKDNDLRLLLTNGRIIKDERQPFADQSLYTADSENEEDKRRTKKAKMKIEESSGVEGVEHEESQKPLNGFFTRVKSELRSRSSGYSDISESEDSGPECTALKSIFTTEESESSGDEKKQEITSNFKEESNVMRNFLQKSQKPSRSEIPIKRECPTSTSTEEEAIQGMLSMAGLHYSTCLQRQIQSTDCSGERNSLQDPSSCHGSNHEVRQLYRYDKPVECGYHVKTEDPDLRTSSWIKQFDTSRFHPQDLSRSQKCIRKEGSSEISQRVQSRNYVDSSGSSLQNGKYMQNSNLTSGACQISNGSLSPERPVGETSFSVPLHPTKRPASNPPPISNQATKGKRPKKGMATAKQRLGKILKLNRNGHARFFV

SEQ ID NO: 268 - protein, 563 aa, Homo sapiens
MSDDAGDTLATGDKAEVTEMPNSDSLPEDAEVHCDSAAVSHEPTPADPRGEGHENAAVQGAGAAAIGPPVQPQDANALEPPLNGDVTEDTLAECIDSVSLEAEPRSEIPLQEQNYLAVDSPPSGGGWAGWGSWGKSLLSSASATVGHGLTAVKEKAGATLRIHGVNSGSSEGAQPNTENGVPEITDAATDQGPAESPPTSPSSASRGMLSAITNVVQNTGKSVLTGGLDALEFIGKKTMNVLAESDPGFKRTKTLMERTVSLSQMLREAKEKEKQRLAQQLTMERTAHYGMLFDEYQGLSHLEALEILSNESESKVQSFLASLDGEKLELLKNDLISIKDIFAAKELENEENQEEQGLEEKGEEFARMLTELLFELHVAATPDKLNKAMKRAHDWVEEDQTVVSVDVAKVSEEETKKEEKEEKSQDPQEDKKEEKKTKTIEEVYMSSIESLAEVTARCIEQLHKVAELILHGQEEEKPAQDQAKVLIKLTTAMCNEVASLSKKFTNSLTTVGSNKKAEVLNPMISSVLLEGCNSTTYIQDAFQLLLPVLQVSHIQTSCLKAQP

SEQ ID NO: 269 - protein, 76 aa, Homo sapiens [sequence omitted]

SEQ ID NO: 270 - protein, 944 aa, Homo sapiens
MLAELFMCFEVLKPDFVQVKDLPDGHAASPRGTEASPPQNNSGSSSPVFTFRHPLLSSGGPQSPLRGSTGSLKSSPSMSHMEALGKAWNRQLSRPLSQAVSFSTPFGLDSDVDVVMGDPVLLRSVSSDSLGPPRPAPARTPTQPPPEPGDLPTIEEALQIIHSAEPRLLPDGAADGSFYLHSPEGPSKPSLASPYLPEGTSKPLSDRPTKAPVYMPHPETPSKPSPCLVGEASKPPAPSEGSPKAVASSPAATNSEVKMTSFAERKKQLVKAEAEAGAGSPTSTPAPPEALSSEMSELSARLEEKRRAIEAQKRRIEAIFAKHRQRLGKSAFLQVQPREASGEAEAEAEEADSGPVPGGERPAGEGQGEPTSRPKAVTFSPDLGPVPHEGLGEYNRAVSKLSAALSSLQRDMQRLTDQQQRLLAPPEAPGSAPPPAAWVIPGPTTGPKAASPSPARRVPATRRSPGPGPSQSPRSPKHTRPAELRLAPLTRVLTPPHDVDSLPHLRKFSPSQVPVQTRSSILLAEETPPEEPAARPGLIEIPLGSLADPAAEDEGDGSPAGAEDSLEEEASSEGEPRVGLGFFYKDEDKPEDEMAQKRASLLERQQRRAEEARRRKQWQEVEKEQRREEAARLAQEEAPGPAPLVSAVPMATPAPAARAPAEEEVGPRKGDFTRQEYERRAQLKLMDDLDKVLRPRAAGSGGPGRGGRRATRPRSGCCDDSALARSPARGLLGSRLSKIYSQSTLSLSTVANEAHNNLGVKRPTSRAPSPSGLMSPSRLPGSRERDWENGSNASSPASVPEYTGPRLYKEPSAKSNKFIIHNALSHCCLAGKVNEPQKNRILEEIEKSKANHFLILFRDSSCQFRALYTLSGETEELSRLAGYGPRTVTPAMVEGIYKYNSDRKRFTQIPAKTMSMSVDAFTIQGHLWQGKKPTTPKKGGGTPK

SEQ ID NO: 271 - protein, 1212 aa, Homo sapiens
MALMFTGHLLFLALLMFAFSTFEESVSNYSEWAVFTDDIDQFKTQKVQDFRPNQKLKKSMLHPSLYFDAGEIQAMRQKSRASHLHLFRAIRSAVTVMLSNPTYYLPPPKHADFAAKWNEIYGNNLPPLALYCLLCPEDKVAFEFVLEYMDRMVGYKDWLVENAPGDEVPIGHSLTGFATAFDFLYNLLDNHRRQKYLEKIWVITEEMYEYSKVRSWGKQLLHNHQATNMIALLTGALVTGVDKGSKANIWKQAVVDVMEKTMFLLNHIVDGSLDEGVAYGSYTAKSVTQYVFLAQRHFNINNLDNNWLKMHFWFYYATLLPGFQRTVGIADSNYNWFYGPESQLVFLDKFILKNGAGNWLAQQIRKHRPKDGPMVPSTAQRWSTLHTEYIWYDPQLTPQPPADYGTAKIHTFPNWGVVTYGAGLPNTQTNTFVSFKSGKLGGRAVYDIVHFQPYSWIDGWRSFNPGHEHPDQNSFTFAPNGQVFVSEALYGPKLSHLNNVLVFAPSPSSQCNKPWEGQLGECAQWLKWTGEEVGDAAGEIITASQHGEMVFVSGEAVSAYSSAMRLKSVYRALLLLNSQTLLVVDHIERQEDSPINSVSAFFHNLDIDFKYIPYKFMNRYNGAMMDVWDAHYKMFWFDHHGNSPMASIQEAEQAAEFKKRWTQFVNVTFQMEPTITRIAYVFYGPYINVSSCRFIDSSNPGLQISLNVNNTEHVVSIVTDYHNLKTRFNYLGFGGFASVADQGQITRFGLGTQAIVKPVRHDRIIFPFGFKFNIAVGLILCISLVILTFQWRFYLSFRKLMRWILILVIALWFIELLDVWSTCSQPICAKWTRTEAEGSKKSLSSEGHHMDLPDVVITSLPGSGAEILKQLFFNSSDFLYIRVPTAYIDIPETELEIDSFVDACEWKVSDIRSGHFRLLRGWLQSLVQDTKLHLQNIHLHEPNRGKLAQYFAMNKDKKRKFKRRESLPEQRSQMKGAFDRDAEYIRALRRHLVYYPSARPVLSLSSGSWTLKLHFFQEVLGASMRALYIVRDPRAWIYSMLYNSKPSLYSLKNVPEHLAKLFKIEGGKGKCNLNSGYAFEYEPLRKELSKSKSNAVSLLSHLWLANTAAALRINTDLLPTSYQLVKFEDIVHFPQKTTERIFAFLGIPLSPASLNQILFATSTNLFYLPYEGEISPTNTNVWKQNLPRDEIKLIENICWTLMDRLGYPKFMD

SEQ ID NO: 272 - protein, 679 aa, Homo sapiens
MSSQVHVQEAYYGPQADLAHCHAYLVEMSQLLQSMDVLHRTYSAPAINAIQGGSFESPKKEKRSHRRWRSRAIGKDAKGTLQVPKPFSGPVRLHSSNPNLSTLDFGEEKNYSDGSETSSEFSKMQEDLCHIAHKVYFTLRSAFNIMSAEREKLKQLMEQDASSSPSAQVIGLKNALSSALAQNTDLKERLRRIHAESLLLDSPAVAKSGDNLAEENSRDENRALVHQLSNESRLSITDSLSEFFDAQEVLLSPSSSENEISDDDSYVSDISDNLSLDNLSNDLDNERQTLGPVLDSGREAKSRRRTCLPAPCPSSSNISLWNILRNNIGKDLSKVAMPVELNEPLNTLQRLCEELEYSELLDKAAQIPSPLERMVYVAAFAISAYASSYYRAGSKPFNPVLGETYECIREDKGFQFFSEQVSHHPPISACHAESRNFVFWQDVRWKNKFWGKSMEIVPIGTTHVTLPVFGDHFEWNKVTSCIHNILSGQRWIEHYGEIVIKNLHDDSCYCKVNFIKAKYWSTNAHEIEGTVFDRSGKAVHRLFGKWHESIYCGGGSSSACVWRANPMPKGYEQYYSFTQFALELNEMDPSSKSLLPPTDTRFRPDQRFLEEGNLEEAEIQKQRIEQLQRERRRVLEENHVEHQPRFFRKSDDDSWVSNGTYLELRKDLGFSKLDHPVLW

SEQ ID NO: 273 - protein, 1378 aa, Homo sapiens
MSLLMFTQLLLCGFLYVRVDGSRLRQEDFPPRIVEHPSDVIVSKGEPTTLNCKAEGRPTPTIEWYKDGERVETDKDDPRSHRMLLPSGSLFFLRIVHGRRSKPDEGSYVCVARNYLGEAVSRNASLEVALLRDDFRQNPTDVVVAAGEPAILECQPPRGHPEPTIYWKKDKVRIDDKEERISIRGGKLMISNTRKSDAGMYTCVGTNMVGERDSDPAELTVFERPTFLRRPINQVVLEEEAVEFRCQVQGDPQPTVRWKKDDADLPRGRYDIKDDYTLRIKKTMSTDEGTYMCIAENRVGKMEASATLTVRAPPQFVVRPRDQIVAQGRTVTFPCETKGNPQPAVFWQKEGSQNLLFPNQPQQPNSRCSVSPTGDLTITNIQRSDAGYYICQALTVAGSILAKAQLEVTDVLTDRPPPIILQGPANQTLAVDGTALLKCKATGDPLPVISWLKEGFTFPGRDPRATIQEQGTLQIKNLRISDTGTYTCVATSSSGETSWSAVLDVTESGATISKNYDLSDLPGPPSKPQVTDVTKNSVTLSWQPGTPGTLPASAYIIEAFSQSVSNSWQTVANHVKTTLYTVRGLRPNTIYLFMVRAINPQGLSDPSPMSDPVRTQDISPPAQGVDHRQVQKELGDVLVRLHNPVVLTPTTVQVTWTVDRQPQFIQGYRVMYRQTSGLQATSSWQNLDAKVPTERSAVLVNLKKGVTYEIKVRPYFNEFQGMDSESKTVRTTEEAPSAPPQSVTVLTVGSYNSTSISVSWDPPPPDHQNGIIQEYKIWCLGNETRFHINKTVDAAIRSVIIGGLFPGIQYRVEVAASTSAGVGVKSEPQPIIIGRRNEVVITENNNSITEQITDVVKQPAFIAGIGGACWVILMGFSIWLYWRRKKRKGLSNYAVTFQRGDGGLMSNGSRPGLLNAGDPSYPWLADSWPATSLPVNNSNSGPNEIGNFGRGDVLPPVPGQGDKTATMLSDGAIYSSIDFTTKTSYNSSSQITQATPYATTQILHSNSIHELAVDLPDPQWKSSIQQKTDLMGFGYSLPDQNKGNNGGKGEKKKKNKNSSKPQKNNGSTWANVPLPPPPVQPLPGTELEHYAVEQQENGYDSDSWCPPLPVQTYLHQGLEDELEEDDDRVPTPPVRGVASSPAISFGQQSTATLTPSPREEMQPMLQAHLDELTRAYQFDIAKQTWHIQSNNQPPQPPVPPLGYVSGALISDLETDVADDDADDEEEALEIPRPLRALDQTPGSSMDNLDSSVTGKAFTSSQRPRPTSPFSTDSNTSAALSQSQRPRPTKKHKGGRMDQQPALPHRREGMTDEEALVPYSKPSFPSPGGHSSSGTASSKGSTGPRKTEVLRAGHQRNASDLLDIGYMGSNSQGQFTGEL

SEQ ID NO: 274 - protein, 1522 aa, Homo sapiens
MCDLSNASVKTTAKDIQQTEQTIEQKLVQAQNLTQGWEEIKHLKSELWIYLQDADQQLQNMKRRHSELELNIAQNMVSQVKDFVKKLQSKQASVNTIIEKVNKLTKKEESPEHKEINHLNDQWLDLCRQSNNLCLQREEDLQRTRDYHDCMNVVEVFLEKFTTEWDNLARSDAESTAVHLEALKKLALALQERKYAIEDLKDQKQKMIEHLNLDDKELVKEQTSHLEQRWFQLEDLIKRKIQVSVTNLEELNVVQSRFQELMEWAEEQQPNIAEALKQSPPPDMAQNLLMDHLAICSELEAKQMLLKSLIKDADRVMADLGLNERQVIQKALSDAQSHVNCLSDLVGQRRKYLNKALSEKTQFLMAVFQATSQIQQHERKIMFREHICLLPDDVSKQVKTCKSAQASLKTYQNEVTGLWAQGRELMKEVTEQEKSEVLGKLQELQSVYDSVLQKCSHRLQELEKNLVSRKHFKEDFDKACHWLKQADIVTFPEINLMNESSELHTQLAKYQNILEQSPEYENLLLTLQRTGQTILPSLNEVDHSYLSEKLNALPRQFNVIVALAKDKFYKVQEAILARKEYASLIELTTQSLSELEAQFLRMSKVPTDLAVEEALSLQDGCRAILDEVAGLGEAVDELNQKKEGFRSTGQPWQPDKMLHLVTLYHRLKRQTEQRVSLLEDTTSAYQEHEKMCQQLERQLKSVKEEQSKVNEETLPAEEKLKMYHSLAGSLQDSGIVLKRVTIHLEDLAPHLDPLAYEKARHQIQSWQGELKLLTSAIGETVTECESRMVQSIDFQTEMSRSLDWLRRVKAELSGPVYLDLNLQDIQEEIRKIQIHQEEVQSSLRIMNALSHKEKEKFTKAKELISADLEHSLAELSELDGDIQEALRTRQATLTEIYSQCQRYYQVFQAANDWLEDAQEMLQLAGNGLDVESAEENLKSHMEFFSTEDQFHSNLEELHSLVATLDPLIKPTGKEDLEQKVASLELRSQRMSRDSGAQVDLLQRCTAQWHDYQKAREEVIELMNDTEKKLSEFSLLKTSSSHEAEEKLSEHKALVSVVNSFHEKIVALEEKASQLEKTGNDASKATLSRSMTTVWQRWTRLRAVAQDQEKILEDAVDEWTGFNNKVKKATEMIDQLQDKLPGSSAEKASKAELLTLLEYHDTFVLELEQQQSALGMLRQQTLSMLQDGAAPTPGEEPPLMQEITAMQDRCLNMQEKVKTNGKLVKQELKDREMVETQINSVKCWVQETKEYLGNPTIEIDAQLEELQILLTEATNHRQNIEKMAEEQKEKYLGLYTILPSELSLQLAEVALDLKIRDQIQDKIKEVEQSKATSQELSRQIQKLAKDLTTILTKLKAKTDNVVQAKTDQKVLGEELDGCNSKLMELDAAVQKFLEQNGQLGKPLAKKIGKLTELHQQTIRQAENRLSKLNQAASHLEEYNEMLELILKWIEKAKVLAHGTIAWNSASQLREQYILHQEVGQPRASHESTSHAGYVSSFPLKLHEKNVPFLSVTSSRKLFHPFVT

SEQ ID NO: 275 - protein, 324 aa, Homo sapiens
MMPFTEVKRTCANSQTRMALSAVSELITSKEQLYEMFQQILGIKKLEHQLLYNACQLDNADEQAAQIRRELDGRLQLADKMAKKYVNVILEEKKSRWPETLGLICEVVPDVPSNPMNELVQERKFPKFIAKDMENMYIEELRSSVNLLMANLESLPVSKGGPEFKLQKLKRSQNSAFLDIGDENEIQLSKSDVVLSFTLEIVIMEVQGLKSVAPNRIVYCTMEVEGEKLQTDQAEASRPQWGTQGDFTTTHPRPVVKVKLFTESTGVLALEDKELGRVILYPTSNSSKSAELHRMVVPKNSQDSDLKIKLAVRMDKPAHMKHSG

SEQ ID NO: 276 - protein, 157 aa, Homo sapiens
MATSVLCCLRCCRDGGTGHIPLKEMPAVQLDTQHMGIWGIGVATQKVNLNQIPLGRDMHSLVMRNDGALYHNNEEKNRLPANSLPQEGDVVGITYDHVELNVYLNGKNMHCPASGIRGTVYPVVYVDDSAILDCQFSEFYHTPPPGFEKILFEQQIF

SEQ ID NO: 277 - protein, 343 aa, Homo sapiens
MKMEEAVGKVEELIESEAPPKASEQETAKEEDGSVELESQVQKDGVADSTVISSMPCLLMELRRDSSESQLASTESDKPTTGRVYESDSSNHCMLSPSSSGHLADSDTLSSAEENEPSQAETAVEGDPSGVSGATVGRKSRRSRSESETSTMAAKKNRQSSDKQNGRVAKVKGHRSQKHKERIRLLRQKREAAARKKYNLLQDSSTSDSDLTCDSSTSSSDDDEEVSGSSKTITAEIPGHLDPGFLASDKTSAGNAPLNEEINIASSDSEVEIVGVQEHARCVHPRGGVIQSVSSWKHGSGTQYVSTRQTQSWTAVTPQQTWASPAEVVDLTLDEDSRRKYLL

SEQ ID NO: 278 - protein, 142 aa, Homo sapiens
MQLTHQLDLFPECRIVDPFQILVAANKAVHLYKLGKMKTRTLSTEIIFNLSPNNNISEALKKFGISANDTSILIVYIEEGEKQINQEYLISQVEGHQVSLKNLPEIMNITEVKKIYKLSSQEESIGTLLDAIICRMSTKDVL

SEQ ID NO: 279 - protein, 186 aa, Homo sapiens
MDTFSTKSLALQAQKKLLSKMASKAVVAVLVDDTSSEVLDELYRATREFTRSRKEAQKMLKNLVKVALKLGLLLRGDQLGGEELALLRRFRHRARCLAMTAVSFHQVDFTFDRRVLAVGLLECRDLLHQAVGPHLTAKSHGRINHVFGHLADCDFLAALYGPAEPYRSHLRRICEGLGRMLDEGSL

SEQ ID NO: 280 - protein, 400 aa, Homo sapiens
MRTLVGLLTSNQALLQLEAARCLHELSHSEQSTVAEACLPATSYLLTYLSSHSSDFIPGMKQAKPSAFVACSQELCLYTLGNLIVESEAVRRQLLPQGIVPALAACIQSPHVAVLEALGYALSQLLQAEEAPEKIIPSILASTLPQHMLQMLQPGPKLNPGVAVEFAWCLHYIICSQVSNPLLIGHGALSTLGLLLLDLAGAVQKSEDAGLELLACPVLRCLSNLLTEAAVETVGGQMQLRDERVVAALFILLQFFFQKQPSLLPEGLWLLNNLTANSPSFCTSLLSLDLIEPLLQLLPVSNVVSVMVLTVLCNVAEKGPAYCQRLWPGPLLPALLHTLAFSDTEVVGQSLELLHLLFLYQPEAVQVFLQQSGLQALERHQEEAQLQDRVYALQQTALQG

SEQ ID NO: 281 - protein, 77 aa, Homo sapiens [sequence omitted]

SEQ ID NO: 282 - protein, 177 aa, Homo sapiens
MRSLCQPWSFLRPRRRGAPLRCPRGRPKPPRRRLRLGLGNSQTQREPTMVLSPADKTNVKAAWGKVGAHAGEYGAEALERHFDLSHGSAQVKGHGKKVADALTNAVAHVDDMPNALSALSDLHAHKLRVDPVNFKLLSHCLLVTLAAHLPAEFTPAVHASLDKFLASVSTVLTSKYR

SEQ ID NO: 283 - protein, 200 aa, Homo sapiens [sequence omitted]

SEQ ID NO: 284 - protein, 47 aa, Homo sapiens
MWGSGLRSLSALQGHLEACLLASGGGARLQEGPATCHLPCDQAKKWN

SEQ ID NO: 285 - protein, 108 aa, Homo sapiens
MTRLDCLMSFNLPRNPLVGITSFFMILYFSTSNSKNSIQPLKLTSNSSLRSFSFLRNQMYIFELSLYLEGTSFVVVLLFLLISVSLDSPPTTKGWDSVLHIWVPLIVQ

SEQ ID NO: 286 - protein, 44 aa, Homo sapiens
MFHVFVLLLTFIALSPSGIRLLFGFIQKGLNLNSFMFRLELLHF

SEQ ID NO: 287 - protein, 129 aa, Homo sapiens
MFPVSSGCFQEQQETNKSLPHSASTPETRTKFTQDNLCHAQRERLDSANLWVLVDCILRDTSEDLGLQCDAVNLAFGRRCEELEDARHKLQHHLHKMLREITDQEHNVVALKEAIKDKEEPLHIAQTRL

SEQ ID NO: 288 - protein, 167 aa, Homo sapiens
MSLWLCFQCPLGVSKSNKKRINLCASTPETWTKFTQDNLCRSQREHLDSANLWVLVDCIFRDTSEDLGLQCDAVNLAFGRRCEELEDTRHKLQHHLHKMLREITDQKQRGGTEGGHQGQGGTSAHSPDPSVPALALAQHGAVWQCSPVQVLPGPLRQSHLPPSTSSL

SEQ ID NO: 289 - protein, 212 aa, Homo sapiens
MPILQLLTTVDDGIQAIVHCPDTGKDIWNLLFDLVCHEFCQSDDPPIILQEQKTVLASVFSVLSAIYASQTEQEYLKIEKVDLPLIDSLIRVLQNMEQCQKKPENSAESNTEETKRTDLTQDDFHLKILKDILCEFLSNIFQALTKETVAQGVKEGQLSKQKCSSAFQNLLPFYSPVVEDFIKILREVDKALADDLEKNFPSLKEPYAKIQM

SEQ ID NO: 290 - protein, 124 aa, Homo sapiens
MQGKQPLLGQRTAVCPLWSPCLARGSVTPAMRTLAILAAILLVALQAQAEPLQARADEVAAAPEQIAADIPEVVVSLAWDESLAPKHPGSRKNMDCYCRIPACIAGERRYGTCIYQGRLWAFCC

SEQ ID NO: 291 - protein, 524 aa, Homo sapiens
MDTESTYSGYSYYSSHSKKSHRQGERTRERHKSPRNKDGRGSEKSVTIQPPTGEPLLGNDSTRTEEVQDDNWGETTTAITGTSEHSISQEDIARISKDMEDSVGLDCKRYLGLTVASFLGLLVFLTPIAFILLPPILWRDELEPCGTICEGLFISMAFKLLILLIGTWALFFRKRRADMPRVFVFRALLLVLIFLFVVSYWLFYGVRILDSRDRNYQGIVQYAVSLVDALLFIHYLAIVLLELRQLQPMFTLQVVRSTDGESRFYSLGHLSIQRAALVVLENYYKDFTIYNPNLLTASKFRAAKHMAGLKVYNVDGPSNNATGQSRAMIAAAARRRDSSHNELYYEEAEHERRVKKRKARLVVAVEEAFIHIQRLQAEEQQKAPGEVMDPREAAQAIFPSMARALQKYLRITRQQNYHSMESILQHLAFCITNGMTPKAFLERYLSAGPTLQYDKDRWLSTQWRLVSDEAVTNGLRDGIVFVLKCLDFSLVVNVKKIPFIILSEEFIDPKSHKFVLRLQSETSV

SEQ ID NO: 292 - protein, 945 aa, Homo sapiens
MGARSGARGALLLALLLCWDPRLSQAGTDSGSEVLPDSFPSAPAEPLPYFLQEPQDAYIVKNKPVELRCRAFPATQIYFKCNGEWVSQNDHVTQEGLDEATGLRVREVQIEVSRQQVEELFGLEDYWCQCVAWSSAGTTKSRRAYVRIAYLRKNFDQEPLGKEVPLDHEVLLQCRPPEGVPVAEVEWLKNEDVIDPTQDTNFLLTIDHNLIIRQARLSDTANYTCVAKNIVAKRRSTTATVIVYVNGGWSSWAEWSPCSNRCGRGWQKRTRTCTNPAPLNGGAFCEGQAFQKTACTTICPVDGAWTEWSKWSACSTECAHWRSRECMAPPPQNGGRDCSGTLLDSKNCTDGLCMQNKKTLSDPNSQVLEASGDAALYAGLVVAIFVVVAILMAVGVVVYRRNCRDFDTDITDSSAALTGGFHPVNFKTARPSNPQLLHPSVPPDLTASAGIYRGPVYALQDSTDKIPMTNSPLLDPLPSLKVKVYSSSTTGSGPGLADGADLLGVLPPGTYPSDFARDTHFLHLRSASLGSQQLLGLPRDPGSSVSGTFGCLGGRLSIPGTGVSLLVPNGAIPQGKFYEMYLLINKAESTLPLSEGTQTVLSPSVTCGPTGLLLCRPVILTMPHCAEVSARDWIFQLKTQAHQGHWEEVVTLDEETLNTPCYCQLEPRACHILLDQLGTYVFTGESYSRSAVKRLQLAVFAPALCTSLEYSLRVYCLEDTPVALKEVLELERTLGGYLVEEPKPLMFKDSYHNLRLSLHDLPHAHWRSKLLAKYQEIPFYHIWSGSQKALHCTFTLERHSLASTELTCKICVRQVEGEGQIFQLHTTLAETPAGSLDTLCSAPGSTVTTQLGPYAFKIPLSIRQKICNSLDAPNSRGNDWRMLAQKLSMDRYLNYFATKASPTGVILDLWEALQQDDGDLNSLASALEEMGKSEMLVAVATDGDC

SEQ ID NO: 293 - DNA, 712 bp, Homo sapiens
gcaccaagacccagtgcttccctgacctctggtccctctaaatcagcatctatcacagtagatcaacctggataaagccaggattcacagcagaagtggcacctcagacaccaaagcagctttccttctcaaagcttttaaacatcattgggaaaacttagagcaaatcaaaccaatgtttttcaatacatggaaggaaagatgtgtgtgcttggttttgttttttgctgagacccaaacattgttagtgcaagcccccgccaggggtgcaggtggagtcaaagctgaatgaagagctcgtcttcaatgtagctctccaagctttcagagcaagacaaccatgggccatcctcttgttcagactggcctgtcttcttcttgaccaatgtcactttgctcctcactgctgtcctcttgtagatcctggaatccatttcccatctgttatatgttgccattaggcacaggcggtcactctgtgaatgtggtcctgcttaggtatttcttttggcaactcctctctctcacgtgctccctcctgttcccctactgcagcatcttcctcctcctcctcctcctcctcctcttcctcttctgaatccaccaaaaccatgacatcatccatgttttgtatagttagaataagagcgcatatttttaaagctatgaattcctttgccatagcgttgactatataataaatacgttgtcc

SEQ ID NO: 294 - DNA, 451 bp, Homo sapiens
  misc_feature (1)...(451): n = a,t,c or g
ggctcgggtggttacgcaccctggaagggaataaacattaggaccatagaggacgctctaggactaatgctcatcagaaaatgactaggagtgctggcatccctatgttcttttttcagatgggaaacattccccccaaggcaaaaacgcccctaagatgtattctggagaattgggaccaatttgaccctcagatgctaagaaagaaactacttatattcttctgcagtactgcctggccacaatatcctcttcaagggggagaaacctggcctcctaagagaagtataaattataacagcatcttacagctagacctcttttgtagaaaagaaggcaaatggagtgaagtgccatatgtgcaaactttcttttcattaagagaacactggcaattatataanaagtgtgatttatgccctacaggaagccctcagagtctacctcccta

SEQ ID NO: 295 - DNA, 1389 bp, Homo sapiens
tttttttttttgggtgtggtgatgtatttattcataatatattttcagaacacattaataatggagaataacacttattcatatactgaatataacttttcctggagcacctctaagagcttgtttggagttggagaatactgccagggcttttcctaatctctttggtctttggaagtgggccaggggtttctcaaaccaagtgtcttccatgggccattggcaaaggcttcccttcatccagcttggaggggcagaaagaccatggcttcagcacttccattttggaaagaagtaacaaaaaaagtgaattaatgagcaatcggaaagactcaaagcattttgtactccacagttcatttcttcacacaaacgtccattactgcagcgggcatgaaaaccaggcaggggtgttaggctcatggcctgaagagaagtcacatcaccagccgatgttttcatgcaaaaggcaatcgtgatgattcagaacctggttctgaaatttctccaggtgtgctcgtgagctgaaaggtccatgcccattctgtgcatcctgtgtctttctactggtaaacttggatgtccattttagagtatcttggcaaaatggtgagaggatctcactttcccaatatcactctgtaatgaagctgcttgggggatcctccatttgattgtggagagaccaaggcaccgtgggctgaagcaacgaatattaacaacactaacaacaataaggataaagtctaagtctcttccaaaaaaggcatatccaaaaataagggtaaagagctggtcttatttcatccaagtgattctgtgcactggaaattgtccttccgttcctccctttcagttaaaagtgtttatatttctgagtcggatgatccatttaaatacataccaatattagcaccaaggcagcatatttttttccccagagatcacatggaaactgaatacttatttaacatagttaatagttggtacaatctgtgatatcactaacatacttattggctgatacttgcctagaaatgccaaaaatatcttttatacaactcttatagcaccttgatgatggctagattgttttaaaaaaattcattttaaaaaagtaacaataaaacatttacagatgaaaagtaaacaatagtgtaccgtgataatgaaggatcactttgtcatattactacatgcaaaggcagtcataatagaatcattttacgtacaaaaatattacatcacaataaataatttcaaacataaatattaaactttacatcattaggatagtctacatatctacatacacacatatatgtgtatatatgtatgtgtagatatgtatatatgtatatgtacacacatttacacacacaagcataa

SEQ ID NO: 296 - DNA, 2536 bp, Homo sapiens
  misc_feature (1)...(2536): n = a,t,c or g
tgtgtcagcagaatcattacgctttgctgggcacgagggcagggcagagtgagattgcgtccatgctgtattcccgcatgttcatcaagtgctcgtttgccccaatggcagatgacgagagccctacatcatcctcggcagaagagtaactgtgagggaggcggggaccagccagaccgggagcaaaccgtcccttgtccccgtctcctccctgttcccgttcctccctggcccaccccactcacactccccaaggcccacgggtcaaaggcaagcgagctctccctctgcttccctgggggagccccgacggccacaggactccagctccaagtgggttttcttggctcccctgttcaaagtggccacagcgcagaccgaagcaaaattcttgtatacattggcgccagggctgatgctggggtggggggtttatgaagaacattgagaacaatcagctggtaattatggatggaggaagagggagaggaaaaaaatattgtatttttgaatcattgttgcaggagggggtgggaatcttaggatttgttgccagatttgaaagtcactggaacttgcatattttccattttaatcctaagtgttattacgccacccagttggggttcaccctttcatcccctcacatttaattgtctgatatagaaatagtgttgtgtccactgccccgctagacggctttcttaggggaattttcttctggttgtttcacaagacagattctgtccttgtcaacccgggacagaaaacttcagtctttttcacccgcattcaggatggaaggggactcagggacaggctctgtggacttacaggggacccaatcatttcacaatgaggaaatttaccggccaggcgtggttgactcacgtctgtaatcccagcactttgggagggcaaggcaagagcttgagcttgagcctagacgttaaagaccagcctgggcaacacgagcaagacccatctctacaagaaatttaaaaactagccaggcgtggtggtgcgcgcctgtaagtcccagctacttgggaggctgagnccctggaaggtcgaggctacagtgagctatgatcacaccattgcacttcagcctgggcgacacagcgagaccctgtctcaagaaagaaaaaaaaaagagacaaattacccagaaacccctcccttccccacatggaggccttggcaaatgttaattttcctagaaaatccttcagacctggaagacgccgggaaaagaatctggctctccaggggtggcttctgcgtccccgccgccaggccccaaactatggacacagggccgtcctgttcctccccgggactccagaatttctctcctcaaaggaaagaaaacagggcatgcgcttgttgacaaaacgcagggccggctcccaaaaaccccatgtgtgtacgattaaaaagttgggccgtccccagggcttccagcgcaaactttaaagagacagggctttgctgaaaaccaaacatgggccagctgggctttttaacaacctagagactttccggagctgcctgggaacagaaccctgcgggaaaacggggcttgccagaggacacttcacagtttcctttcatgggcctgtttttggttccccttaaggaatcttccacatcattgtctttcttgtgccttttccttggtgagcaacagaaagagaagggttccaagcctctaaaaatgtgctttgtgatcaggagtgcgctccaaaccaaatacgcgcgctgccctttcgaggccagtggagctcagcctccaaggctttaaagccacatttcagcaagagaaagcgctgagagctcgcaggttcattaaagaaggcaaagcactaggtttctctccttaggaaaagtaggtttcttgggttgatgtagaatgggtttgctttggatttttcagtgaaaggggaatgttacgtaaaaacaaaatagggcttggctggtcaaaggagacaagcaggatggatggatggatggatggatggatggatggatggatggatgaatagatagatggtgtttgccatgttaaattgccagagaaaacaaaacccaaagcttgattggaaaaccaatttaattgtggggtgtcctgaggggggaaggtcgcaagctttgggcaagcctttgaggaagcggtacaaagagttcctgtgccctgtgtgtccagcccctggaagccagccagtgcatttattttaaactctttaaaaaccactcccttggcccatggaatgcgtgaccccgtgagatgggtccacgcatctctctacacttccttctctccgtgggatactggactcgtgcctctgcgcccattctctttctcacgcatatccgatgagctttaatttcactttctgatcacggtacgtccataaaagccagtattacactttaaatgaagtatttctttttttgtaatcgtttttttttaggaaggtaaacaaattttaataaagctaccgaataatgttgaaaaaaaaaaaaaaaaaaa

SEQ ID NO: 297 - DNA, 685 bp, Homo sapiens
  misc_feature (1)...(685): n = a,t,c or g
aggcctagaattcggcacgagggcacagactcagagagagcggaccatggtgctcgtctcctgccgacaagaccaaagcccaacgccccccgcggctaaagctcggcgccacgcctggcgagtatggtggcgagcccctggagaggatgttcctgtccttccccaaccaaccaagacctacttcccgaaacttcgaaccttaagccaaagntctgccccaaacggctctgccccaggtttaagggccacggccaagaaaggtggccgaacgcgcttgaaccaaaagccgtggcggcaacgtggaacgaacatgccccaaacggcgctgtccggccctgaagcgaccttgcacggcggcacaagctttcgggtgggacccggttcaattttcaaaggttcctaaaggccattgccttgcttgggttgaccctggggccgtccaccttccccggctggagtttcaacccctgtcggtggcacgccttcccttgggacaagtttcctgggtttcttgttgaagcaccgtgcttgaacctccaaattaccgttaaagctggagcctcgggtgggccatgcttctttgccccttggggcttccccccagggccctccttccctttcctggaacccgtaaccccgtggtctttgaataaagtctgagtgggcggcaaaaaaaaaaaaaaaa

SEQ ID NO: 298 - DNA, 452 bp, Homo sapiens
tagtccagcgcggaggaattcgcgggcgctgctgggcctcgggctgctggttgcgggctcgcgcctgccgcggatcaaaagccagaccatcgcctgtcgctcgggacccacctggtggggaccgcagcggctgaactcgggtggccgctgggactcagaggtcatggcgagcacggtggtgaagtacctgaggcatatccccccacgtccatgtccaggagcccccctactgtcctggtcatctgtggcccggggaataatggaggagatggtctggtctgtgctcgacacctcatactctttggctacgagccaaccatctattaccccagaaggcctaacaagcccctcttcactgcattggtgacccagtgtcagaaaatggacatccctttccttggggaaatgcccgcacagcccatgacgattgatgaactgtatgagctggtggg

SEQ ID NO: 299 - DNA, 1936 bp, Homo sapiens
  misc_feature (1)...(1936): n = a,t,c or g
tttttttttttttttaaaaggatttaaaaattactcttttactttttattacaatagaataagtgatcaattaatagaattaaacaacttttcaattaaaacctactgcattacttttggggtttcacagcagcaggaaacaaacataaatccagttgaaagggcaaggctttccagaatccagtgccaagaaacagtctggtcttgattattcgggactagcaatggggaaatactggatacaggataatgccaaaaaccaatggaatgcatcgggcatactctcctttgtaacatcacattatctgaacacttttaaaatattccaggctaaggtaatttaaggccaaggcccatggaggctctggtttctggcaacaggttaggagttctcccccaggcaagcccggcagcacaattgctcccagagccaccctctggcccagaaaacggggccccatcatcatggcagaccttagaagcctccaccctggtgggaagcagccatctttctcaaagctctttatggctcacacaacccatggttaaaggaaaatgggaaagtgacatatgtaaagggcctttctcgaggactgagatgaactggaagacagacagactgtggcctccccagatcaggaaagaggcctccagaagtaaggggcccacatgccagatgaactccccacatgaaagaaactatcctgataaaggctgacccattttgctgataatcaagcagactgcatgtatatatgaatatatccataccataccatatggtaggtgaaatatatggtgtacatatttaaaatgggcatacacaccacatcacnaccacaacccagataaaataaatggtacatacattgctactatgaacactgcacgtcccagacagaccaatgactaatatgttcaattaaactacttgaattaaactactcttcctctccccaaaatattctgcttgcagcaaacatattccagttggctcaagcggtgttgtttcctaggttccctgagaaggaatggaatcgtccctcttgtttccagaacacctaacagaaagcccaactgccaacaggacccaagcctaaaacaaattccatatttgaatttgggcccatgaattccctcccacctattccttagtccacagggcatgaaaccttactcagaaagatatcaatttctttttcctacaactggctacagtatttactgtattatgttagatggaggggactgggggaaggcgggcagcaggcagtttacatgttggcaatcattcatttgctttcccttttaccaaaagaaaatgctactttaaaaaaaaaaaacacccagaaatttagagttcaataatgaattttgctttcttggcacatttttgaaatgatcatatcattacatgtagctaggtcttttatcctcctggaatgctcctcctagggaggcaaggtatctaaacaacaaaataaccctacaaaaaaagttaatattgtgagcagtctcaatttgtagttattaaactcaaagtctaatgctgaaaggcaacagtaatttaaacagatttgtttatttttattattattttttgagatggagtcttgctctgtcactctggctggagtgcagtggcacaatctctgctcactgcaatctccatctcccaggttcaagtgattctcctgcctcagcctccccagtaactgggattacaggcacatgccaccatgcccagctaatttttttgtatttttattacatgacggggtttcgccatgttgctcaggttggtgtcgaactcctgggctcaagcaatccacctgccttggcttcccaaagtgctgggattacaggcacctgccccagatttataatgctattcacagatcttgcagaattataacaggctccttctacaacttgg

SEQ ID NO: 300 - DNA, 1413 bp, Homo sapiens
tgctctctgtgagccgcaacctttccaagggagtggttgtgtgatcgccatcttagggagaaagatgttctcgtccgtggcgcactctggcgcgggcgaaccccttcaacacgccacatcctgcagctggtgcacgatggtctcggggacctccgcagcagctccccagggcccacgggcaagccccgccgcccctcgcaaccatggcagccgccgccgtggaagagcagtatagctgtgactatggatctggcagattctttatcctttgtggacttggaggaattattagctgtggcacaacacatacaagcattggttcctctagatcctggttaaatgcagaatgaaggttggacccccaaaagtacaaagggcatatttaacggatttctcaagttacacttaaagaggatggtgttccgtggtttggctaaaggattggctccgacttttccttggctactccatgcagggactctgcaagtttggcttttatgaagtctttaaaagtcttgtataggcatatgcttggagaggagaatacttatctctggcgcacatcactataatttggctgcctatgcccgtgctgaattctttgctgacattgccctggcttcctatggaagctgctaaggttcgaattcaaacccagcccaggttatgccaaacactttgaggggatgcagctccccaaaatgtattaaggaagaaggccttacaagcattcttacaagaggggtgctccctctctggatgagacagataccatacaccatgaattgaagttccccatgccttgaacgtactgtttgaagccactgtacaagtttgtggttccctaagcccccgcagtgaaatgttcaaaagccagagcagcttggttgtaaccatttggtagcaggttaccatagctcgagtcttttgtgccaattgtttctcaccccgtgctgattctgtggtatctggtgttgaataaaggaaaaaggtagccagtgctttctctggtccctcaaagagacttgggatttaaaaggtgtaatggaagggactgtttgcccgtatcatccatgattggtacccctgactgcacttacagtggtttatctattgactccgtgaaggtctacttcagaccttcctcgccctcctccaccccgagatgcaagagtcttttgaagaagaagcttggggttaactccagtagttagatcaaagcaaattgtggactgaatctgcttgttgatccagtgtttgaagaaagtgcaaaaggaacttttatatatttgacagtgtaggaaattgtctattcctgatataattactgtagtactcttgcttaaggcaagaagtttcagatttactgttgtaaataaacccgaactcttcatgaaaaaaaaacaacaaaaa

SEQ ID NO: 301 - DNA, 495 bp, Homo sapiens
ggcacgaggtggttttgtctgctgcgcccgctcttcgcgctctcggttcattttctgcagcgcgccggcaggatggcccacaagcagatctactactcggacaagtacttcgacgaacactacgagtaccggcatgttatgttacccagagaactttccaaacaagtacctaaaactcatctgatgtctgaagaggagtggaggagacttggtgtccaacagagtctaggctgggttcattacatgattcatgagccaggtaagctatgctatgttatagtaaagcagtaattgttgaaatattggtggttatggttgtcaaaattttaaaaatatcattgacatcaaatgatatctgaaagtaactgttctgataagtttttttttttaatgactaatttcttgactctggagagagttccaattttatggtaaataaaataccacagcagtgaaagtaacacattattctacttggaaaataatgtaagaagt

SEQ ID NO: 302 - DNA, 2430 bp, Homo sapiens
ggcggtggagagggaaattcaagcggccgcgtggtgcggaggacaaaagcgggcggcgggccgatgtgtctgacggcgctccctctctgctttttgttctcgcctcgccgccccgcccctccgcagctctcgaggctcctcccgctgcgggtcggcgctcgccctcgctctcctcgccctccgccccggccccggccccggccccgcgcccgccatggagaagactgagctgatccagaagcgccaagctggccgatgcgaggcgtagcgtctacgacgacatggccacctggcatgaaggcagtgaccgagcagggcgcccgagctgtccaacgaggagcgcaacctgctctccggtggcctacaagaacgtggtcgggggccgcaagtcccgccttggaagggtcattctctagcatcgagcagaaagaccgacacctccgacaagaagttgcagctgattaaggactatcgggagaaagtggagtccgagctgagattccatcttgcaccacggtgctgggaattgttggataaattatttaatagccaatgcaaactaatccagagagtaagggtcttctatcttgaaaatgaaggggtgatttactttccgggtacctttgcctggaagttgcctgttgttgatgatcgaaaaacaaacgatagataattacccaaggagcttaccaaggaggcattttgatattaaggcaagaaaggaggttgcaacccacacacccaattccgcctggggggtttgctctttaactttttctgtattttactatgagattccttaataacccagaagcttgcctgcacgcctggctaaaaacggctttttgatggagggccattgcctgacttgatacactgaatgaaagactcatacaaagacagcacccctcatcatgcagttgctaagagacaaccctaccactttgggacatcagacagtgcaggagaagaatgtgatgcggcagaaggggctgaaaactaaatccatacagggtgttcatccttctttcctttcaaggaaaccttttttacacatcttccatttccttatttccacttgggattttcctattaggccaaaggaaacccctttcatgtgtttggggattcaactgtttatagtctttttcacactgcagctttggggaaaacttcatttccttggatttgtgttttgtcttggggctttcctgggggttgccagtactgctgtagggaaaagtattaatagcttcaattcatattaaacataagtaactccaaaccacttatggaagaggactaaaaatgtatctggtatttaagtaatctgaaccagttctgcaagtgactgtgttttgtattactgtgaaaataagaaaatgtagttaattacaatttaaagagtattccacataacttcttaatttctacattccctccccttacttctacggggatttcatttaagatagcaacgtttcccatgctctaaatgaattcctattctagtaggaatccgaaaggatttagatgaaatggaaaggcacttgcccatctctgtctaggggttcacaaattgaaagggtccttgtatcccaatcgggagttccttgtgtaacctgtggccaacagggaggttcccttattcactctttattttgctgctgtttaagttgacaacccacccttctcaaataaaaaatacactatacacctacctgccattagtagtttctggtattccactttactatgtgatagaagtagcatgttgctgccagaatacaagcattgctttgggccaaattaaagtgcatgtcatttctttaatacactcgtaaggggagattaaattaaggtacacaaggtcccaaggtctaaaacctttagtactttttccatgcagatttgtgccacatgctgagagggatgtcccagttttttctagtgattgttatttagagaggtggacccactatggtgtgtggctaatccattgactgtagtcccgaaaaaaagccttgtgaaaatgttatgccctatgtaacaggcaggagtaacataaaataaaagtacattttataaacccatttactatggctttggtaacaaattgccatacccatattttaagggacaggtgaaatttactactttctaaagtttattgatacttcccttttatgtaaaatgtagtagtgatacctatatttaccacattgtgcattgtgacacactttgtctagggatgcctggaagtgtataaaattggactgcatttcttagagtgttttactatagatcagtctcatgggccatctcttcctcagatgtaaatgatatctggttaagtgttatatggccataaagtggacattttaaaactagcaaagttaaaaaaaaaaaaaaaaaaaaaaggcggccgct

SEQ ID NO: 303 - DNA, 915 bp, Homo sapiens
atggaaaccagtgtgattgaaggtggattaaatatcactctcaccatccgactacttatgcatggaaaggaagttggcagtatcatcggaaagaaaggagaatcagttaagaagatgcgcgaggagagtggtgcacctatcaacatctcagaagggaattgtcctgagagaattatcacttttgctggacctgctaatgccgtcttcaaaggctttgctatgatcattgacaaactggaagaggacataagcagctctatgaccagtagcacagctgccagtagacccccagtcaccctgaggctggtggtccctgctagtcagtgtggctctctcattggaaaaggtggttgcaagatcaaggaaatacgagagagtacaggggctcaggccatcactattgctggcatcccacaatccatcattgagtgtgtcaaacagatctgtgtggtcatgttggagtcccccccgaagggcgtgaccatcccgtaccagctcaagccttccagctctccggtcatctttgcaggcggtcaggcctatacccttcaaggacagtttgccattccacagccagatttgaccatgctgcaccagttggcaatgcaacagtctcattttcccatgacgcatggcaacactggattcagtgcaggtttggatacatctgctcagactacttctcatgaacttaccattccaaacgatttgattggctgcataatcgggcgtcaaggcgccaaaataaatgagatccgtcagatgtctggggcacagatcaaaattgcgaacccagtggaaggatctactgataggcaggttaccatcactggatctgctgccagcattagcctggctcaatatctaatcaatgtcaggctttcctcggagacgggtggcatggggagcagctag

SEQ ID NO: 304 - DNA, 1105 bp, Homo sapiens
ggcacgagcaaagttgtcatgaatactgacttgggcgtgggacccatccgagatgtgctggaccacatctacagtgcgctgtatgtggagctggtggtgaagaatcccctgtgcccgctgggccaaactgtgcaaagtgagctctttcgctcccgactggactcctatgttcgctctctgcccttcttctccgcccgggctggctgaagcaacctacctcaagtctcaggagaattcatgtctgcctggggcccttccgggaacccgagcccaaggagtgggggcggccccggagcgaggctcacactccccgccctgcagaatgactgtccacaacctgtacctgtttgaccggaatggagtgtgtctgcactacagcgaatggcaccgcgaggaagcaagcaggggatctcccaaggaggaggagtataaggctgatgtacggggatggctcttctctatccgctcgtttgtcagcaagatgtccccgctagacatgaaggatgggcttcctgggccttccaaacttagccgttacaaactccattactacggagacgcccactggggatcaaagtttgtcatgaattactgactttaggcgttgggacccatcccgagattgttgctgcaccaacatcttacaagtgcgcttgtatgtgggagcttggtggtgaaagaatcccccttggtcccgctggggcccaaaactgtgccaaagtgaagctcttttcggttcccggacttggactccctatgttcgcttctctgccctttctttctcccgcccagggctgggcttgaagcaaccttacctcaagtcttcagggagaattcatggtctgcctggggggcccttccgaaccttgtgccaactaaaggggcccccactgtaagcccccgtacccccaccccttggcccagagcaacatcctaaaaggcctgccctggatgctctcctcctaccagagtgaagcccacaggagtccctccacctccacaccaaggcccttctctccaagttttatcccctgcctaaatgctgcgaggaagcacaggaataaacctttttgtcactctcaaaaaaaaaaaaaaaaaaattcct

SEQ ID NO: 305 - DNA, 540 bp, Homo sapiens
caagtgatccagcaaggtcggcagagcaagggcgttacgcagaaggacctggccacgaaaatcaatgagaagccacaggtgatcgcggactatgagagcggacgggccatacccaataaccaggtgcttggcaaaatcgagcgggccattgatgtgggaaccaggagtgctcgtgtgctgagagcccagtgaggcacgggagcggcgtggccccccttccctgggaagatgttgaagaggggccagcgtttgggggaggagggagctggtgctgcagtggccagtggctgtggctcatttcaggcctcaagctccggggaaaggacattggaaagcccatcgagaatggggcctagggcgaaatgaacacaaagcctcgaaatcagtgcgctccagctgatctcgttccgccggttccccttggccgccagttccgttcatctcacgggccgaacggaacaaggggtccagcttgcgggggaccctccccagcccattcctgctgtcaaacaaacaaaaccttgcaaagcgaaaaaaaaa

SEQ ID NO: 306 - DNA, 449 bp, Homo sapiens
ttttcatgacttttaatgctttattgggattgcaagcgttacaaggttaaagacaaaacccaagcatgggattttgccggaaatattagcgttaaaggagctgagttgagtcaaacacgggccgcaagtggaccgaggcggcaggcacaggtgacattcagtgtttggcgtgggggtcttcaggtgatggcagaggaggggacccaagaggccgagtccctgccgcagccctaggcgccgcggtggtggctgctatggcatcaccagacccgtgggctccggggcccaagcaacctggtcgatgggcagacctggcagctctcctgctctgtgggctcagacccgcctgacctccctactccccggcctcaccccaccttgcccccaagaggtcccacagagcttcggacctcctggagacaaggcagggtgctgaggggcgggcaaga

SEQ ID NO: 307 - DNA, 417 bp, Homo sapiens
  misc_feature (1)...(417): n = a,t,c or g
gcttcttcgcttctctcttggaaagtccagtctctcctcggcttgcaatggaccccaactgctcctgcgccgctggtgtctcctgcacctgcgctggttcctgcaagtgcaaagagtgcaaatgcacctcctgcaagaagagtgagtgtgaggccatctccatggtctggggctgtggctaaggctgctgctcctgctgccccgtgntgctagcaagtgtgcccagggctgtgtttgcaaaggggcgtcagagaagtgcagctgctgcgactgatgccacggacaacctttctcccagactgtaaacagagagacatgtacaaacctggattttttttttataccaccttgacccatttgctacattccttttcctgtgaaatatgtgagtgataattaaacactttagacctgatt

SEQ ID NO: 308 - DNA, 892 bp, Homo sapiens
  misc_feature (1)...(892): n = a,t,c or g
tttcgtgccggtcggaggcggtcggcggaggtgtctaccccgccggtgatggcgttgaacgccactggcttcccggccttccgtccgctgcctccgtccgattctgcgtctgcttgctgaggaggcggattaggggggcgcggagtctcttcccttgagtgcataggtcccggttggtagagggtttgagtccgcatcgccacagctgaaggctgcgagggactaagagcagaatattaccttaggaattgagtggaccatttgggaagggcattttccgagcgctaaagctcttgttgaaagattaagagatcatgacgattgcagcagaatctcctgattgagcaaaccacagctcctcaacaagccgaggtagaagccatgaaacagtatcatggaagaaattcaagaacttaatgaagtcgcgagacatcggccacggtccaccgttagttattgggaatccagcaagaaaacagacaaatcagagagttgcaacaagaaaacaaagaattacgtacatctctgggaagaacatcagtccggccttgggaacttataatgagcaagtaccgagaacaaatggttaagattgctaatggctagcaaaaaaagatgatccgggtataataatgaagttaaaaggagcagcactcccangattgacattggtacatcgtaacaagtccgaaggattcttccttgatgcatctcgacacatccttgaagcacctcaacatggactggagagaaggcacttggaagcaaatcagaatgtacactaaataaacagtcaacttttggggtgtggatggaaggggggtccattttaaaagtgcttttacattgaatttccctcccagattagatcagcaaataaatgaaatttatt

SEQ ID NO: 309 - DNA, 512 bp, Homo sapiens
ggctctcgcagtcctctttcgtcagtgtcttttgcttcgactcccggcggagcgcgcaacgtggagtgacgtgcaggggccaagtgcaacccaggcagccacggctgtttcggagctcaggactctaaaatggcagagcagctttctccaggaaaggcggtggatcaggtgtgcaccttccttttcaaaaagcctgggcggaaaggggctgctggacgcagaaagcgcccggcctgcgacccagagcccggagaaagcggcagcagtagcgacgaaggctgcactgtggttcgaccggaaaagaagcgggtgacccacaatccaatgatacagaagacccgtgacagtggtaaacagaaggcggcttacggcgacttgagcagcgaagaggaagaggaaaatgagcccgagagtctcggcgtggtttataaatccacccgttcggcgaaacccgtgggaccagaggatatgggagcgacagctgaggggcaaggaggatgacaagatctatc

SEQ ID NO: 310 - DNA, 488 bp, Homo sapiens
  misc_feature (1)...(488): n = a,t,c or g
ggaggtgggncaggcagactcatgtcagaaggcccctcagtgagaagcgaagaagcaatctgtctttattatgaggaactaggaggtggggccaggcagactcatgtcagaaggcccctcagtgagtgcagcccaggagactggtcacattctggggttgcggaagggccttgntgcattcagtttctccacatcacttctcatggggccaaggaagctctgtccacgtggcttgggctcctgacttcaggtccagccaccacagccgccgtcctgccatgatatgggagccgagaagacccagggcagataaaggccgcatccacagagtccagggntaatcccatgaggggtcccgactttccttcttccagccgntttcggataaccgtttactagggtatagcctnccttttttcaggaagacattttacctggggtgccttgggaccagatagantttttttttncccggggaaaaggcagca

SEQ ID NO: 311 - DNA, 1776 bp, Homo sapiens
  misc_feature (1)...(1776): n = a,t,c or g
gatttgctctgccagcagctgtcggtgccgcgctcgacaccgagtcctagctaggcgctcacagaatacgcgctccctccctcccccttctctgtcccccgcctctcgctcaccccggcccactccagcggcgactttgagggattccctctctggcggcctctgcagcagcacagccggcctcattcggggcactgcgagtatggatctccaaggaagaggggtccccagcatcgacagacttcgagttctcctgatgttgttccatacaatggctcaaatcatggcagaacaagaagtggaaaatctctcaggcctttccactaaccctgaaaaagatatatttgtggtgcgggaaaatgggacgacgtgtctcatggcagagtttgcagccaaatttattgtaccttatgatgtgtgggccagcaactacgtagatctgatcacagaacaggccgatatcgcattgacccggggagctgaggtgaagggccgctgtggccacagccagtcggagctgcaagtgttctgggtggatcgcgcatatgcactcaaaatgctctttgtaaaggaaagccacaacatgtccaagggacctgagggcgactttggagggntgagcaaaagtgcagtttgtctacggattcctcgggagaaaacccactttcaaagacgcatcagttgctnggggaagccaacagccaacttgcaccacctctctgccttggtcacccccgctgggaagtcctatgagtgtcaagctcaacaaaccatttcactggcctctagtgatccgcagaagacggtcaccatgatcctgtctgcggtccacatccaaccttttgacattatctcagattttgtcttcagtgaagagcataaatgcccagtggatgagcgggagcaactggaagaaaccttgcccctgattttggggctcatcttgggcctcgtcatcatggtaacactcgcgatttaccacgtccaccacaaaatgactgccaaccaggtgcagatccctcgggacagatcccagtataagcacatgggctagaggccgttaggcaggcaccccctattcctgctcccccaactggatcaggtagaacaacaaaagcacttttccatcttgtacacgagatacaccaacatagctacaatcaaacaggcctgggtatctgaggcttgcttggcttgtgtccatgcttaaacccacggaagggggagactctttcggatttgtagggtgaaatggcaattattctctccatgctggggaggaggggaggagggtctcagacagctttcgtgctcatggtgggcttggctttgaactctcccaaagaagcnaatcaaaggccacttggagctgtaatctggccccccaaaagtttaggggattgaaaaacatgccatcttttgaagggaggaaacccctttaggttcagaagaatatggggtgctttgctcccttggacacagctggcttatcctatacagttgtcaatgcacacagaatacaacctcatgctccctgcagcaagacccctgaaagtgattcatgcttctggctggcattctgcatgtttagtgattgtcttgggaatgtttcactgctacccgcatccagcgactgcagcaccagaaaacgactaaatgtaactatgcagagttgtttggacttcttcctgtgccaggtccaagtcgggggacctgaagaatcaatctgtgtgagtctgtttttcaaaatggaattaaaccccactattctctggc

SEQ ID NO: 312 - DNA, 512 bp, Homo sapiens
acaaagatcaaactatacttgaaaataaacagcaatatgatattgagataacaagaataaaaattgaattggaggaagccctagtcaatgtgaaaagctcccagtttaagttagaaactgctgaaaaggaaaaccagatattggggataacattacgtcagcgtgatgctgaggtgactcgactaaaagaattaaccagactttttaaaactgtggacttaaatgttctgcaaagtcttacacaaaagcccaatacagtacatgaactacggaaaagcagaactgctctgaacaaggaagaggtgggagatctgagtcctggccccagcacccacttcaacttcagtcacctccttggaatctggggttctgcagcttgaaataatcagtttggattttaaacttatttgtaacataataataatcctaggaactttaaaataatattttgtactaaattttagaattattataataagtgatctaataaaacagtcttttcctgaaaaaaa

SEQ ID NO: 313 - DNA, 560 bp, Homo sapiens
tttttttttttttccaataaaaaataattcaactttattagtatgaaatattttgagataattagtgacccaaatgcatgattctccaatatgaaaggtgttcagcataagcatacaatcatttagtaaaactgctctttatgagacccccagaaaagctggaggcacttcctttttttggtggagagagaagacactacttaactggccatttccttgctggagtttattccgaattcccttttgtctgattcttcctcctcaaactcgactaaaggagtgtgtctgttggcctgagcaccttctctgtagaacactttctttactgtgccatcctttggagactttatggtatgctccatcttcatggcgatcataaccatgagggaatctcccgctttcactttgtctccagctttgacaaacaccttttcaatgggttccagtcataggagctaagggggccgccctgagtttcttgtgagctcacagaagataagtatttggggactggaatgtcaatctcaatacttccttccttggaaaataggtaaatagtg

SEQ ID NO: 314 - DNA, 1590 bp, Homo sapiens
atgcagctgctgctggcagagtgcatgggtcagagtgggccaccaggagctgtctgccattgccagagggtgtggcaggccagagccgtccgcagaagcaaaaggccagtcccatcgaccacccaagggctgaagagtgtgggcgcatggcgtgggagtggcaggcagctccacctgcagccccagtacaggatccactgggtgaagccagctgggctcctgagtctggtggggaccatggagaacatttgtgtctggcccagcgattgtaaatacaccaatcggcactctgtatctagctcaagattgctggactcgctgaagagagactacgcaggaaagccccagccacccatcaaatcagagagaaggaatccaccttcttacgctatggcagctgcgcagctccgtgactcagaggagaccgggggatcagagtttgtttttgcggaaaagactttaaggaagtgtgtcaaatgcccacaggtagagctggaaaatgtggcctttgctaaagatgcagaagagtctagagacgcacaacggctgggtcattggtggccctgcatcatggaaactctttctaatgcaagtggtacttttgccatacgccttttaaagatactgtgtcaagataacccttcgcacaacgtgttctgttctcctgtgagcatctcctctgccctggccatggttctcctaggggcaaagggaaacaccgcaacccagatggcccaggcactgtctttaaacacagaggaagacattcatcgggctttccagtcgcttctcactgaagtgaacaaggctggcacacagtacctgctgagaacggccaacaggctctttggagagaaaacttgtcagttcctctcaacgtttaaggaatcctgtcttcaattctaccatgctgagctgaaggagctttcctttatcagagctgcagaagagtccaggaaacacatcaacacctgggtctcaaaaaagaccgaaggccagcgacggctgctcggtgacggcgctgctctgccaccaagaaaaaccccaaacccactgatcccacaaagaggggagaaaaaggaaggcttcatgctgaagaaggagaaatacaaacgtacagaagaacttaaggtcaagttttacagagataaccaaggacatcttaaaggagacaggctgtgcgatcattggaagagggaagctgtggatcttgcattcatgcatttggatgaagatgacactggaaactgcacgttgcaggttgaggtggccaagtatcaacggaatgggaaatatgaggcttcaggaaggaagtgcgcgaaccacaggaaggctccgtctctacggcagaagcggccacgccgcagcccatccaaacgccgcgacacgagtgagttgtcctcatcgaacacatttcatcctgtggattttgaggatggccagagaagaccttcaaggagagtcaagtttggaccaactcggaggctcattgtctttgacagacacccagctggtgaacctgtgtcctggaggaatgcaggagcagctgctcattgtattcaaacctttgatggaaggtggtttgaatga

SEQ ID NO: 315 - DNA, 546 bp, Homo sapiens
  misc_feature (1)...(546): n = a,t,c or g
tctggttgtcatggatgcactggtagaagatgatatctgtattctgaatcatgaaanagcccataagagagatacagtgactccagtttcaatatattcaggagatgaatctgttgcttcccattttgctcttgtcactgcatatgaagacatcaaaaaacgacttaaggattcagagaaagagaactctttgttaaagaagagaataagatttttggaagaaaaggtaatttttatcttttaccttcattgcgtttgtgacataaggaataattcaaaatacttgaaattttgaatactttttgtcctgtcttccatgattgtactaaatttccaagaataactcactgctaatctgaaaactctgggcattatacttatcctgtgtttcacataccatgtacttggtaaatatttgtaggagaggatttaacaacttggagttatattccaaatatttttctttcattttcaggtttacttacctccatagctgtatgtattttattcagaattttcaaatctgggcaaaaaaaaaaaaaaaaa

SEQ ID NO: 316 - DNA, 808 bp, Homo sapiens
  misc_feature (1)...(808): n = a,t,c or g
ggcacgagagagcagttaaggcacacagagcaccagctccctcctgcgctgaagatgttccaccaaatttgggcagctctgctctacttctatggtattatccttaactccatctaccagtgccctgagcacagttcaactgacaactctggggcgtggatgggaaggagttcccagaggtccacttgggccagtggtactttatcgcaggggcagctcccactcaaggaggagttggcaactttttgaaccctgttggacaacattgtctttcaaaatatgggctgctggcttctgcccccgattgcagcttccaacctttcggtgctacccatccgcatgtgagtgggaaagatggggctcttgtgtgcccccggaaaatgggatcttacccacctggactgaagggggaggcacagatcttcaagaaacttgaaggggccgcccttgacatggaagactgaagctctttttccagcttcatggccccagggtgggaatcatgctgaaatgagaacaggcccagggtttaccagcgctttctcctctacaatcgctcacccacatcctcccgaaaagtgtgtggaggaattcaagtccctgacttcctgccctggacttccaaagccttcttagttgactcctagggaatcaagaggcctgtgagctgtccaataactgacctgtaacttcatctaagttccccagatggggnacaatgggagctgagttgttggagggaggaagcttggagacttccagctccagctcccactcaaagataataaagataatttttcaaatcctc

SEQ ID NO: 317 - DNA, 406 bp, Homo sapiens
tttcgtcgatggcctcggcgctgagctatgtctccaagttcaagtccttcgtgatcttgttcgtcaccccgctcctgctgctgccactcgtcattctgatgcccgccaagattctggactccaggcaggtgtgtgtccagtacatgaaggacaccaacatgctgttcctgggcggcctcatcgtggccgtggctgtggagcgctggaacctgcacaagaggatcgccctgcgcacgctcctctgggtgggggccaagcctgcacggctgatgctgggcttcatgggcgtcacagccctcctgtccatgtggatcagtaacacggcaaccacggccatgatggtgcccatcgtggaggccatattgcagcagatggaagccacaagcgcagccaccgaggccggcct

SEQ ID NO: 318 - DNA, 432 bp, Homo sapiens
cctgaggatgcacctcttgaaaatgtggagtgtgacaatatgaaccgctttgaccgaccagacagaaatgttcggcagcctcaggaaggtttttggaaaaggccaccccagaggtggagtggacaggagcattaccacctcagccaccctgaccactatcatcaccatggaaaaagtgacttgagcagcctcaagtactacagccttccagcagccttcccagacccacagaccacacccagggaaaactaataaagccacaacgtatcgaggcccgcagtgaatgctcaatccaagacatgcatcagggcggtgccatccggaagaaagctttacacacgtcttgcaccaagaaagcaactatggtttggaagagcagcctttttcatcaggcccacaattaacaatggatgtggctaagagtacaccttc

SEQ ID NO: 319 - DNA, 1131 bp, Homo sapiens
gagtggggccccgaaatctgagggtgatcgtagtcactagttgtggcccccatgcaggagcggagagcgagttctggtttctgaaacctcgagggatgggagagtatctgggccgggtggacggaggcggggagatggagagcgctagacaccccagttttagagtgcagatggatcccgcttaaggcaacaaaaaaaagcctggtttatgtgtcgacgctttgatgcttttgagtcgtgaggcggtctggctttttgttttgtttgtttgttttgtttttatcttccatgaacagcgcttccgtggatgggcatctcagtggttgtcgtctttttctcttcctttcacctcttttcaggttttattgtgactactgcgatacatactctcaccccatgactctccatctgtgagacagaccacactgcagtggaaagcaaacacatagagaatgtgaaagactattatcagaaattggatggaaaaagcagtctcagagcctgatttgacaaaaccaacggcttgcatttccaacaaggaaaagaaccctcctaattccattctctgctccttccttccttccaggggccgatgataccaaccttcccccccaagccttcggggttcctcctcgcccttggtatgaatgcccaagcacccccatattgggggggcccttcccatggatggccaatgattgggcccctccctcttcctggggattgattgcccagtggggacctgcttctggggaattgaggccggcccatggggaggccattattgccaattgattgcctggggtcccccaatggatgtaggaccttcttgcccgttccattgatggtgccccctcgggcccggaatgacttcgaccagacagataaggatagaggggaggcccttattgtatcgggttttatattacctgttctgcttcaccaggagatcatgctgctgtgatacttgagttttctaaacgagcataaggaagacttgctcccctgtcctatgaaagagaatagttttggaggggagaagtgggacaaaaaaagatgcagttttcctttgtattgggaaatgtgaaaataaaattgtcaactctttcagttaaaaaaaaaaaggaattc

SEQ ID NO: 320 - DNA, 443 bp, Homo sapiens
cagaagcagcagatcccttctgacctacagagtatgaaacttgttccttgcataaaagaagcctttttgttgaagaatgggtgaaggaaacacttgctgttctgtgccagccaaacaatacccatttgtcaccccaattgaagagagaattctcatggaagagggaaaagccttccccccctcaagatctacagctaaacagaaacttgatggaaaccctgtttctcctactccggtttattggcctctcccccacaccaaacaaagaagaaaagcacctgaatctttgcccctttgagccgactggccatctggatggagcacgtgatacagctggaccaagttggttgcatcatcgattctgagaatgaaagggtttaatgttatctaggggttttcttcatttgattcacagtcctataaaagtgtgtgccaacttcaaa

SEQ ID NO: 321 - DNA, 401 bp, Homo sapiens
aggcaggcaggtcagtgatgtgtcctaagggtccgaccgacctagatacccctctttgattcctcctcttgggattagtgtccatctctggaagcaggatccaggaggacgggaggggccgctgcggaccgcagtcgctccacctggaggagacaccagaaggaagacagcctgagggacgcagccatccccggctcctaccggcgccccgccccgcgcatgcgcacgcgcacagggagtcagctggctgcgcgggaggtcacgggaagtggggcggtgcccacacagctggagggaaggaggtgtcaggcggggagagacgcaaacggcgggaccagcagcgacggggaggcacacgatccgaggtccttttagtctcagaggatgggaagatcctggcg

SEQ ID NO: 322 - DNA, 381 bp, Homo sapiens
  misc_feature (1)...(381): n = a,t,c or g
aggaaatattaagattcttcttatagtatttaacctattagggtaaaaaggatttaaaataatatatttacatatgtttaaannnnnnnnnnnnnnnnnnnnnnnnnnnnnnnnnnnnnnnnnnnnnnnnnnnnnnnattagggtttttataaaaccaaaagaacttggcaacacccctaggtaccctttataagcctccaattggctacagcctgtgaaggattggcctgtgaccaatcagaggctgaagtggagtcttagctcatggtcaagcagaggctgaagtggaaacttcttgtctttttatcacaggcatgaggatgtggcctgcatgctgcctgatcttgcctagaaccggctgcacctgctgttctcttgtt

SEQ ID NO: 323 - DNA, 1549 bp, Homo sapiens
gtggcaggagaggcggggccaattttgctgagctttctcgcgggcttgcagctgcggcaagtgctggcggcggctgctcgcgcaagtcagctggcgtgggaactaccctttgtagctgagaacggcttggctatcgatacaaagactctattgacattggtaccttcagcgggcagcagcttcctacggcataaagctgtagctacctgaagaggctacaagcatccttccctaggactgctgtaagctctgagcactctagcaggagacatgcctcggggacgaaaagagtcggcgccgccgtaatgcgagagccgcataagagaaccgcaacaatcgcaaaatccaggcctcagaggcctccgagacctctatggccggctctgtggtaacgagcaccccccgaaggacgaccctgagcggccccgaggaagtacccgagcactccagaggagggcctcttaccacccctgaaggaagcctcgagcactgcccaagcacaaaagcctttcagttgccgccggagcaatttttcaggggcaccaagaaaagttttcctggatgtctatattacgcgctcatcttcatcatggggcaacagcgccaaggaagctctggtctggaaagtgctggggaagttaggaatgcagcctggacgtcagcacagcatctttggagatccgaagaagatcgtcccagaagagttttgtgcgcagagggtacctgatttataaaccggtggccccgtagcagtccggtggagtatgagttcttctggggggccccgagcacacgtgggaattcgagcaaactgaaagttcatgcatttttgtgggcaagggtttcgtaaaccgattgctcttaaagactggccttgtaattatgactgggattcggacgatgatgccagaggttgaggctatcctccaattcaggtgcttaggggttattccgcccccttaaagtagatctggaggcagacccttgggggtgtaaaaagaggagtcacaggtacccccaaaggagtagatgcccagggtccctaagtttgaaaatgatgtccgattggggggcgggggaccactgtatttgatatttgtgatccagtgatcattgttccaactgccgaaatagagtgtttgctttttgataaatggaaaattgtattccgttttaaaattcccgtttgttgaggaataacaatatgttctcaaaatataattgaacaaattttttttctttgttcccctgtcattgaccatttagtataacagttttgcctaacgttcctaaaatgaagtccgttcccatccataatcctatgatccttgtacagcacttatagaaataagctgttcttttgaagttgaaatacccagtaaaatgttgaagaaggatggaggatttcttcatattctgacgtttctgaaaccctttgtgtctgctgttgtgtgaagattgacatttaccatgattttccttacttactgcagaacatagagaaaaataaaagcctaacgaatagtaaaaaaaaaaaaaaaaaaacact

SEQ ID NO: 324 - DNA, 412 bp, Homo sapiens
cgtcggtggggccggcggtcagtctgcggcagcggcagcaagacggtgcagtgaaggagagtgggcgtctggcggggtccgcagtttcagcagagccgctgcagccatggccccaatcaagacacacctgccagggtttgtggagcaggctgaggctctgaaggccaagggagtccaggtggtggcctgtctgagtgttaatgatgcctttgtgactggcgagtggggccgagcccacaaggcggaaggcaaggttcggctcctggctgatcccactggggcctttgggaaggagacagacttattactagatgattcgctggtgtccatctttgggaatcgacgtctcaagaggttctccatggtggtacaggatggcatagtgaaggccctgaatgtggaaccagatggc

SEQ ID NO: 325 - DNA, 463 bp, Homo sapiens
gcagtggcatcagcgatggcggctgcgtcggggtcggttctgcagcgctgtatcgtgtcgccggcagggaggcatagcgcctctctgatcttcctgcatggctcaggtgattctggacaaggattaagaatgtggatcaagcaggttttaaatcaagatttaacattccaacacataaaaattatttatccaacagctcctcccaggtatgcagtaatttatctcacttgtcaatataactctgtggcataaaatatatatagagagatgtgccagctaggtgttctttaagcttaattttgtatttaacatactttaaattagagtactttgtccccagaatgtattctttattgcagttacactgttggaccaagttttgccaggtgagtaatttattccctttctgtaaagcattccctatagctctgaatttaaactgtgtcccaagcatggcttatgt

SEQ ID NO: 326 - DNA, 583 bp, Homo sapiens
ctttttcagaaacatacatggaaatacagaactacacctgtaattacagagggcatatgaaccctagtttgataagccttgctttaaaggatgcagtgtgttctattaaatgtatttaatacaattgcagaaatggaaaatgtggacctccattaaacaaattttttagttcctaatgagataaacttgggaccaaaccgattcctcttgttttagtgctcaaaaatagtttcatttttaggtatttatgctttagtggcctttttttctacctttaaaattgtttaagttccaagtaattttatttttggatgttatatatattcttaacttttatctctacagatattttctggcaagtttctatacgaagtatgatccaactcacttcatcctaaacacagcttctctcctgagtgtactaattcccaaaatgccacaactacatggtgttcggatctttggaattaataagtattgaaatgttttgaaactgaaaaaaaattttacagctactgaatttcttataaggaaggagtggttagtaaactgcactgtttctgtgataatgtgaaatgagaag

SEQ ID NO: 327 - DNA, 1539 bp, Homo sapiens
taagacactcttgtttcgctccttgacaaccctggcgggggttcgctggctgcggccccggctccggcccccgcaggagcagcaccccccggggaaagacattttctgctcccaccgagttggcagggcctgcttcctgaatctcctgggtgtgtcttaactgccagtcccagcacctcctgaaagccccactctcctccagtggtcacagtggaaggatcatggtagaaacacacgggaagaacgatgactgctgattataagcgactgcagaccttccctctggtcatgcactcggacatgccacaggagatgcgcgcggagaccatggagctatgtgttcacagcctgtgagaaatttttccaacaacaaacggagagcgcccgccaagattgttcaaaagagacaatggacaagaagtttcggctcctcctgggcacgttgtgatcggcgagggctttgggttttgaagatcacccacgaggttgaaagaacctcctctaccctgtacttcgggggcaccttggctgtgtgcgtctggaagttgctccttgacactctgtcccctgccccgtcccctgcagggccttttcctgccactcatctggggtggggagcagccctaggcaggtcctggtttttccaaggagagttggggtcttttctttttgtctttgtgtaccagtttcctgagccacgcccagtgtgtgagacttgacatctccatccccaggctctcaacccgtctccctcggagtctcagggtgtggacggggcagcgggcatgggtctgtgtgggagacgtggggtggggccggtgtgacagggtagaggaggtgggagatgagatcttccgcacaggaacacgccagtccccctttctccaggggctgccttccccttggcatcctggggagccccacttgccctgccatccccagtacttgccggggaagtgtccggccgtcccttgtcattagtggtcatattgaaaatggccccccaagaaggagatgattcttttcaagggacacaggcagcttctctccttgtcctctgggaaggtgcttgacccctcaagaaaccccttccacaaacttgaccccaggctgaacagaccacttgcatctcaactgggcccagcagccccccccagccccccagccttgggtggggaccaagcaagcctttcccgtcccctcctcgacccgtacagtttgagaagccaggggctggtgtgtgggagcttgctaccctggcagtttctcgagggggtcccccgagcctctggtgggacaccttgggcaaggaagtgctctcaccacgaaggctgcttccgcaaggaaacccttggcctgcccgcgacttcgcatcaagggaccgcattgctgatttgtactggtctctgcttgggttttctaatgtcttttcgaagtgtgggaaaagggttttagtagaagggtgaatcgtattttacacagcggtcttatttatataaatgtcttggtttttacaattaaaatgaccaaaaactgaaa

SEQ ID NO: 328 - DNA, 406 bp, Homo sapiens
tcgtaagacacaaaccaccagacgtgggcctgggctctgggctgggccaggtggatgaaggggaggctggtggtccaggcggctgctcttggctgcagggtttctgggcacacatccgggtagcacgcatcctggccttcagcaacctcgttttaaatgggaccacaccaggagcagccagggcgctttcattttcactttctttccccgggggggacaggaacattcctttacctcctgaggaaatcgggctcttccagagccacagaggagtgaaggccccagcccttcacgatgctgcgcggctatgtttgggtctgtccatcagggagaaagaaaaaccggccgagtcttgcacagggtcctcgacagcaaccccaggtaaagagcagagcaagccgtccaa

SEQ ID NO: 329 - DNA, 1108 bp, Homo sapiens
atggtctacggggcttctgaggcaatcgggcagcgtcagtcttcagccgctaagccaagaaggagtcagtcagagaaccttgggccagagttccaggagctctgggagtggctgccaggaaagcgggacttgccgctaagggtgaaggagaaggggttgaggggtacttgcccctgccccaggaaagcgggacttgctgctaagggtgaaggagaaggggttgaggggttcttgcccctgccccaggaaagcagagaagggaacaggaggacaggagactggtctcctaagggaggtcggtcccccgatccgagtcacggcaccaaatttcatgcgcgtccgtgtgaagagaccaccaaacaggctttgtgtgagcaacatggctgtttatttcacctggagcatcgaattgagtgaaaaatgactctggtttcttctctatatcctcagtgtccaccttcacatccaccatggggttgagattctgagctcgctccaaagaggcttcagccctatttcggccaacagacccagtacgaatcaagaactgagctccgggatcttctggagttaccttctcctccaagaaaatgagctggcccacttcccattctaggctaaccctgtatccttgacccattccatcctgcttcttcagggatctcattatgtgctgagaagctggcagccactcccagagcccctggaactctggcccaaggctctccgactgactccttctcggcttggcggctgaagactgacgctgcccgatcacctcgaaagccccgtagaccatcacagacgccgagcttcgagtaacttgggcaagtgacaccttagggtgagtctccttgtctgtaaaaggggctgtggacagtgcctccttcattcggtgacaccgtttctgggcctccagtccccacaggcggatctgccggtcatactgtgccgcctcctcctcgctaatgccgccgccagcctcctccttctccaccatggcgccggctcttcctgcctcagctccggtcccgctcaagccaaccgcccgccggacccgcgcgccacctaccgccgccggcagcacgcccggagtgcttctgcgcat

SEQ ID NO: 330 - DNA, 2035 bp, Homo sapiens
  misc_feature (1)...(2035): n = a,t,c or g
gccaaatccagttttcatatttaaagcgaatgagccccctcctctcagtgggaaagatgagctgaagctttactccctcgatagtgttgggaaaagaaatcagacaaaaatctaaggaaggaccaaatattgtacatagtgtgccagtaggcttttgcaactggactgaaaatacctgccttttctctccacaggggaaagtggaagttgaagctgggaaagaagggatgaaggttgaagcgagcgccttctcatactatggcgagatggccctgacagcctctccaggtgaaaataagtcccctcctcgcccatgtggcttgaatcactcagactctctcagtcgaagcgaccgggattgacgccgtcacaccaacactggggagcagcaataaccagctcaattcttcgctcctccaagtctacatccccgattactccggtgcgagccctttcggatctgcagtttgttaagatctcaagacagcaataccaaaatgccttgatggcatcccgggatggacaaaaccccccagtcttcagacagtgaaaacactaaaatcgaattgactcttacggagctgcatgacgggttgccagacgagacagccaacctgctcaacgaacagaactgtgtgacgcacagtaaggccaaccacagcctgcacaacgaaggcgccatcttaggccgcgctggctgcacccgcccaggcccgcacccgcccagtcccgtaggcccggccctgtctgcccatgacttcactggtgtgagcttgtccgccatgctgtaccctgcaacatcctgagaccaaagaccttgtgcccttcccaggagccgcggaggaggacagtgagggaggaatggaaacgagagatgtgaagttggcagccggggcatggcgttcaagattttggagatgaactgattccgcccaaatagaatcatgtttattttttcagctctcccttttatcattattcacactcctctgccctcgatttgcatgaagttgaaaattgttgcgatttattttttccaagagaatccatgtttttaaagtgtcttttgccagagttttaaagttgttctgtctgaactctgctgtgatcccatgatgtggaccctgatgggctggacttnccccctccggtagccttccttggccctcccagcggaggggcacccttcctctgtgccccagtgggattcaccgtcgatctcgctggctgaatgaagaagaccctgttactgcagaacctgccaagtctgtcatcactgcttggggtgtagcctgcctcagagggccctccaatcacctctctgagctcaatggttattttgagaatttaatgtttaactgtaccccctttccctcaggaagatttaacatttgcttgggaatgtgattttgctcccaccctaaaggaatttttatcaccaaaatggaatgttaaatggaattttaaaacccatggttttattcattgggcaagaggcaagttgacttcatcctgtcattccagcctggggtctgccagccagccctcctccccgacccagcgcctaagctcacagagtgtcgtcgcccacctccctgggtccttgctcttgttaacccaaagatgctgctacacagaatgccaaatgggaaatcttccacagggctttttcagtaaacacggtgatgtgggagttgcaagctcctccccttcccactagaacatactttaacagaaaacgagtcggaccttcttagctgcactctgtactgtgtgcccgagaaggcatttctagacccgtgtttttaaaggagggaactttggggattgccagcccctgctcctcctcccagggagccaactgtccctcctcccctgtcgcctgggcccatggggcccggcagtggctgtgtcccctgcctgagggctctgtgcctcctgcctcagatgcggcctgtgccagagaggctgcctgtacagccagggtcagtttggccccaaacagggattcagaatccaaaaaaaaaaaaaaaaa

SEQ ID NO: 331 - DNA, 381 bp, Homo sapiens; identical to SEQ ID NO: 322
  misc_feature (1)...(381): n = a,t,c or g

SEQ ID NO: 332 - DNA, 1092 bp, Homo sapiens
atgagagccctcacactcctcgccctattggccctggccgcactttgcatcgctggccaggcaggtgagtgcccccacctcccctcaggccgcattgcagtgggggctgagaggaggaagcaccatggcccacctcttctcacccctttggctggcagtccctttgcagtctaaccaccttgttgcaggctcaatccatttgccccagctctgcccttgcagagggagaggagggaagagcaagctgcccgagacgcaggggaaggaggatgagggccctggggatgagctggggtgaaccaggctccctttcctttgcaggtgcgaagcccagcggtgcagagtccagcaaaggtgcaggtatgaggatggacctgatgggttcctggaccctcccctctcaccctggtccctcagtctcattcccccactcctgccacctcctgtctggccatcaggaaggccagcctgctccccacctgatcctcccaaacccagagccacctgatgcctgcccctctgctccacagcctttgtgtccaagcaggagggcagcgaggtagtgaagagacccaggcgctacctgtatcaatggctggggtgagagaaaaggcagagctgggccaaggccctgcctctccgggatggtctgtgggggagctgcagcagggagtggcctctctgggttgtggtgggggtacaggcagcctgccctggtgggcaccctggagccccatgtgtagggagaggagggatgggcattttgcacgggggctgatgccaccacgtcgggtgtctcagagccccaagtcccttacccggatcccctggagcccaggagggaggtgtgtgagctcaatccggactgtaacgagttggctgaccacatcggctttcaggaggcctatcggcgcttctacggcccggtctagggtgtcgctctgcctggcctggccggcaaccccagttttgctcctctccaggcacccttctttcctcttccccttgcccttgccctgacctcccagccctatggatgtggggtccccatcatcccagctgctcccaaataaactccagaagaggaaaaaa

SEQ ID NO: 333 - DNA, 486 bp, Homo sapiens
  misc_feature (1)...(486): n = a,t,c or g
ncattcccactcgggtttgacctacngccgcccgggagaagatggctgccccagcagtggtccgggctctcccgcnaggtgcgatgcttcagtacctctgtggtcagaccatttgccaagcttgtgaggcctcctgttcaggtatacggtattgaaggtcgctatgccacagctctttattctgttttgaatccctatgtgaagcgttccattaaagtgaaaagcctaaatgacatcacagcaaaagagaggttctctcccctcactaccaacctgatcaatttgcttgctgaaaatggtcgattaagcaatacccaaggagtcgtttctgccttttctaccatgatgagtgtccatcgcggagaggtaccttgcacagtggacctctgcatctcctttaggaagaagccacactctctggaattaaaaactggtccctcaagagcttcctaaggtcaaggncaagtattggaaattgggaggcta

SEQ ID NO: 334 - DNA, 510 bp, Homo sapiens
atgagtatgctcaggcttcagaagaggctcgcctctagtgtccttcgctgtggcaagaagaaggtgtggttggaccccaataagaccaatgaaatcgccaatgccaattcccatcagcagatctggaagctgatcaaagatgggctgatcatccgcaagcctgtgacggtccattcccgggctcgatgccagaaaaacaccttggcccactggaagggcaggcacataggcatagataaaagatactgtgaatctaagaagattgatcgccacatgtatcacagcctgtacctgaaggtgcaggggaatgtgttcacaaacaagccgattctcatggaacacagccacaagctgaaggcagacaaggctcacaagaagctcctggctgaccaggctgaggcccgcaggcctaagaccaaggaagcacggaagcgcagtgaagagcgcctccaggccaagaaggaggagatcatcaagactttgttcaaggaggaagacaccaagaaataa

SEQ ID NO: 335 - DNA, 480 bp, Homo sapiens
  misc_feature (1)...(480): n = a,t,c or g
ggcacgagaatgcttcatattaacatagaaaagaaatttcttcacctatctcctgagtcttttgaaatcttcacatatattattttctaaattattattatttaaaattttcttaaagatggagtcttgctctgtctcccaggctggatagagtacagtggcatgatcttagctcactgtaacctcagacttctgggatcaaacaattctcccctcagcctcctgaatagctggggctacaggtgcatgccatcatgcatggctaattttttaaaatttttcgtagagatggggtctcgctacgtagtctaggctgttctcaaactcctggggctcaagcaatcctcccacctcagcctcccaaggcgctggggattattaggtgttgagtcaccatccctggggcttctatttttatttattttaaaaaaaaattattatgtattatattaaatttccngtgaattgatagggggcagg

SEQ ID NO: 336 - DNA, 403 bp, Homo sapiens
cagtcctcatttctgtggaatctgaataagcccacgcatattttaattcccactctagattctggttctaatcaaggtccatgcatgtggtgtcaaccccgtggagacatacattcgctctggtacttatagtagaaaaccactcttaccctatactcctggctcagatgtggctggggtgatagaagctgttggagataatgcatctgctttcaagaaaggtgacagagttttcactagcagcacgatctctgggggttatgcagagtatgctcttgcagcagaccacactgtttacaaactacctgaaaaactggactttaaacaaggagctgccatcggcattccatattttactgcttatcgagctctgatccacagtgcctgtgtgaaagctggagag

SEQ ID NO: 337 - DNA, 1065 bp, Homo sapiens
tgtctcagcggctgccaacagatcatgagccatcagctcctctggggctagctatatgacaacagaactctcaccaaaggaccagacacagtgggcaccatgggacagtgtcggtcagccaacgcagaggatgctcaggaattcagtgatgtggagagggccattgagaccctcatcaagaactttcaccagtactccgtggagggtgggaaggagacgctgaccccttctgagctacgggacctggtcacccagccagctgccccatctcatgccgagcaactgtggcctggaagagaaaattgccaacctgggcagctgcaatgactctaaactggagttcaggagtatctgggagctgattggagaagcggccaagagtgtgaagctggagaggcctgtccgggggcactgagaactccctctgggaattcttggggggtgttggggagagactgtgggcctggaaataaaacttgtctcctctaccaccaccctgtaccctagcctgcacctgtcctcatctctgcaaagttcagcttccttccccaggtctctgtgcactctgtcttggatgctctggggagctcatgggtggtggagtctccaccagagggaggctcaggggactggttgggccagggatgaatatttgagggataaaaattgtgtaagagccaaagaattggtagtagggggagaacagaagaggagctgggctatgggaaatgattttgaataatggaagctgggaatatggcatggatatctggtactaaaagaagggtcgtttaagaacctctttccttatctctttccgcaatccaaaccatagctgtctgtccaagtgctctcttcctgcctccagctctgccccaggcctcctcctagactctgtccctgggctagggcaggggaggagggagagccagggttgggggagaggctgaggagagtgtgacatgtggggagaaggaccaagctgggtgcttgggcattgacagaaatgatggtgtgttttggtatcatttgattaataaaaaaaaaatgaaaaaagtgaaaaaa

SEQ ID NO: 338 - DNA, 362 bp, Homo sapiens
gcggccgcacatattcaccctcagcgtgcctttcccgacccccttggaggcggaaatcgcccatgggtccctggcaccagatgccgagccccaccaaagggtggttgggaaggatctcacaccgctggaaagctgaagactgtcgcctgctccgaatttccgtcatcaactttcttgaccagctttccctggtggtgcggaccatgcagcgctttgggccccccgtttcccgctaagcctggcctgggcaaatggagcgaggtcccactttgcgtctccttgtaggcagtgcgtccatccttccctagggcaggaattcccacagttgctactttcctgggagggcctcatgttttatctgg

SEQ ID NO: 339 - DNA, 420 bp, Homo sapiens
ggacccccgttcacctagtgctggcatcctgcgcactcccatccaggtactctgggccagcgtgggaaaggcagagaatgtctgaattcttgggtctcttcctaacctgattttgagagagccgtcatgaccccacccttatcctagccttattttctgcaatctcaatctgtgtggggtaggctggatatctgagggccttggcaattccttcctggaatatggggaggagaggagagaagagtcagggcccagacttgttctagcctatggtcttgacaggtggagagctctccacagccaggcctaccagcaggggagcaactggagggtcttaaacatgcccaggactcagatccccgctctcctactcttggtattgcacggacacctatgaagaccagcagtggaggtaagcgt

SEQ ID NO: 340 - DNA, 450 bp, Homo sapiens
gctagaagctcattctgaaatggggagcactgaaattttggaaaaggagaccccagaaaatctcagtaatggtaccagcagcaatgtggaagcagccaaaaggttggccaaacgcctttatcagctggacagattcaaaagatcagatgttgcaaaacaccttggcaagaacaacgaatttagcaaactagttgcagaagaatatctgaagttttttgattttacaggaatgacgctggatcagtcactcagagtctcgctctgtcacccaggctggagtgcagtagcaccatcttggctcactgcaacctccaccttccaggttcaagcagttctcctgaatcagcctcccgaataactgggactacaggaaaatgaatctacattgtcaagtgagggtcatctggattcatctcaaataaacagtgctcttagtgactccgagtaaaa

SEQ ID NO: 341 - DNA, 492 bp, Homo sapiens
cggcccgtaattcccggctcgacgatttcgtgggcgctgcgcggcgcagcgaaaatggcggcttccaggtgggcgcgcaaggccgtggtcctgctttgtgcctctgacctgctgctgctgctgctactgctaccaccgcctgggtcctgcgcggccgaaggctcgcccgggacgcccgacgagtctaccccacctccccggaagaagaagaaggatattcgcgattacaatgatgcagacatggcgcgtcttctggagcaatgggaggtccgcggcgcgcgcacaccctcccggctcttctctgtgcgggaccctgttgcctatgaccccttacctgttctgtcttgggacctttctgaccccctaacctcctctactcatgccttgaatccttactgacccactgaagccactgttgaccctccattccttctctgacccgcgcgccctgctgaccctcgctccagccctctgtcattccagtgccctgtt

SEQ ID NO: 342 - DNA, 439 bp, Homo sapiens
  misc_feature (1)...(439): n = a,t,c or g
tttcgtcagagccgggttcctcccgggtttctgccgggtttctccctgctgctcctgggttgttgagactcttgcgaagatggcttgcgctgccgcgcggtccccggccgaccaggacaggtttatttgtatctatcctgcttatttaaataataagaagaccatcgcagagggaaggcgaatccccataagtaaggctgttgaaaatcctacagctacagagattcaagatgtatgttcagcagatggacttaacgtatttcttgaggttaagaatgtctgaggggtcaggcggtgctggcaagatggctgcacttgagaagatgacgtttcccaggaagatgacatttccagagaagccaagccacaaaaagtacagggccgccctgaagaaggagaaacgaaagatacgtcggcaggaacttgctcgactgatagn

SEQ ID NO: 343 - DNA, 508 bp, Homo sapiens
atgctgacggagctggtgcccacacaggccgagcccgcagacctggagctgctgcaggagctcaaccgcacgtgccgagccatgcagcagcgggtcctggagctcatccctcagatcgccaatgagcagctgacagaggagctgctcatcgtcaatgacaatctcaacaatgtgttcctgcgccatgaacggtttgaacggttccgaacaggccccatggctttggctggccactgagggtagggtgtggaggtgtgaaggccccctgaggagctgcggcggcccaggtacgaagctgcaactctgcgcgcagtgggcgagatctcatcagccccaggctgcaggtgagacttcaggggatgctggggccccactgcccctccgctgccttgccctccatccttcctctgttccttctggccgggcaccacagcactggggctcacctcttggttgatcctcttgtactgggagaggtgccttttgtatccccaattaaaggtagaaa

SEQ ID NO: 344 - DNA, 336 bp, Homo sapiens
tcccaaacgttctgtactgtccaagtcagttcctgggtacaagccaaaggtcattccaaatgctatatgtggaatttgtctgaagggtaaggagtccaacaagaaaggaaaggctgaatcacttatacactgctcccaatgtgagaatagtggtcgctggatttgtgactgttgtcagcgggcccccccaacacccaggaaagtgggcagaagggggaaaaacagcaaagagggataaaatagtttttgactctaatactgtatatgcatttaagtggaatatttggtgccatttacaacattattttcatgccaataaaagattttttttgcaaa

SEQ ID NO: 345 - DNA, 2157 bp, Homo sapiens
tttgttaaacaggcattaccattgtatatttaaaaacttgggaagttttaactgaagaaggcagcatgatatgatagcttttgctttttacaatatgatgttattagtcttgttctgtgtggttctggagagcaaaacaataaagcattgtaagttgtatgagtgtaagaacaagtattcactactaattcccagcacatgaatagtactcaatacattttcaataaatgattgaatacatgtatgataaatgaaaaccagtgggttaaacttacaaggaggcagaggcttttttttgttttgttttgtttttgagacagagtcttgctctgtcgcccaggctggagtgcagtggtgcgatctcggcttactgcagcctccacttcctgggttaatttgaagcagaagagggcagttgttatactgccctgtcagttggatgcggagtcttactcaaaattcattctcagcattcttcttttatggtatcttctttggcacttagcagcgcatcaggtaggcatcttctatttttcttcattccttaatttcctttgtatccctcaaatggttatttatttggctggagtctgttttgttcattaagcaaacatgtctttgctttgaacatgtctttgatttgatggatacttaaattcctcatcaaacattttgttgctatgcataacgttttctttggccaactccagcaatttcccacattttgacatgcaatcatgttaactcccattttcttttgtaatccaacatcttctatttagataattactttaacaatcaatgacttaatattctaatcataaatttatacaaaaataaaattacctccaaaacattgctacctttcctaaacattcagtcttgccacagtttaataaaaggaaagaacattaaaaaggataagacactgtaatgattagatgctttttataagcctaaaggcattgtgattatttagacagaagagaagaaagtgaagtgaaaacctgatagttatgtagtctcatggtttgctgttgagaggctgaacaccagctgctttccttttctaggaagataataaagtgggctttggctacaacataaagatgttgggttagacagtttcactacagtaagaacaacgggatgagttgcccaggaaattgtgaaatactttctaatgatctttaaagatataatgaacactaattcatctggatttgtttaggtgtggtcctggttaaaggcaaagggaaggatcagataacttcatgttttttccatttaacatacccaatagattcttgattaaggggaagggaaaatgagcaagatacagtccagtattctaaaaacaatcagccttacggggatcatttccaaaagcatcctggtttttggaccttaaggcctttgataccttaacccaatttgacctaccaccagtggaaaattctagtgcctgggttttatagggtagaagaaagacatgcagtcaagtggccaatacttcatgtggaggataagcaatgagatccttcttgctgtctttccttttgactgttctgggcaatatcaaattagtttcagtggcttgattctaggccaagattctggcaacagattgtagtcttaccttgtttttcttcaatctcactggatctctctctctttttaccccccttaggctgagggtaaaaagctgggattggtaggctgggtccagaacacctgaccggggcacagtgcaaggacaattggcaaggtcccatctcccaaggtgcgtcatatggcaggaatggcctgaaacaagagaagcctatcaaaaaccccctaaaactatcggacaatagcaaacttcaacaatgaaaaagtcatcttgaagttgggattacctcagactttccaaattgttaaaataatgggcctggaattttaagttttcctaaggttaaactccagtggtttggtttttattattaatagagatagaactattgtgtgttaatattaggcattagtcaataagttattttaatgtcagattttttgaatgttattattatattacctgtatgatggaaggattaccacttttccccaattttatccattaaaaacgttagaaccttctgcttagagtacttttaaaaa

SEQ ID NO: 346 - DNA, 375 bp, Homo sapiens
  misc_feature (1)...(375): n = a,t,c or g
cagacagtcttgattctgtaaacaccaagctacacatagaaatagagcaggctttagagacctagtcaaatttgttttccctttccctttttcatttgaagggttttttttgttttttttttttagatttttagatggagtctcgctctgtcgccaggctggagtgcagtggcacgatcttggcttattgcaacctctgcctcccgggttcaagtgattctcctgcctcagcctcacatctgtaatcccagctctcagggaggcaagaggcgggaggatagcttgagcccaggagttcgagacctgcctgggcaatatagcgagaccccattctccagnnnnnnnnnnnnnnnnnnnnnnnnnnnnnnnnnnnnn

SEQ ID NO: 347 - DNA, 3031 bp, Homo sapiens
  misc_feature (1)...(3031): n = a,t,c or g
atgatcgctgatgataagccagctgcgatggctggtgagtcagctggacagtcatctgagtctggagttggggccaacttctttggcatcacattccagacaacagaaacactgatgagcacagggcatctgaatggggccgaatgcaaagcaggtccaggcactgtgaagaccctggcggtggaggaagaggcttcccggctgtggaggaagccagacccttacaacacaagacgagaaccagacctgcgtgggggagctctggatgctacaggggctcaaggagggccactggaccgagcgcgcaaagaacctgagaccgcttgctctcaccgccgcaagtcggtcgcaggacagacaccagtgggcagcaacaaaaaaagaaaccgggttccgggacacgtgccggcggctggactaacctcagcggctgcaaccaaggagcgcgcacaatgctccgatacagggggtctggatccctactctgcgggccatttctccagagcgactttgctcttctgtcctccccacactcaccgctgcatctccctcaccaaaagcgagaagtcggagcgacaacagctctttctgcccaagccccagtcagctgttttcgggtccgagggaaggaggaccctgcgaaagctgcgacgactatcttcccctggggccatggactcggacgccagcctgggtgtccagccgcccgtcgtcgccagagcccgatgacctttttctgccggcccggagtaagggcagcagcggcagcgccgttcagctgggggcaccgtgtcctcgtccaccccgagtgactgcgcgccggagctgagtcgccgagttgcgcgccgctatgggctctgcgaggcgcgcattctgggaccaagctaggaggcagtggattcaagtcgtcctcgtccagcacctcgtcgtctacgtcgtcgtcggctgcgtcgtcctccaagaaggtcaagaagcgaatgacagagccggagctgcagcagctgcgtctcaagatcagcagccgcgagcgcaagcgcatgcacgacctcaacatcgccatggatggcctccgcgaggtcatgccgtacgcacacggcccttcggtgcgcaagctttccaagatcgccacgctgcttgctggcgcgcaactacatctccatgctcaccacttcgctggaggagatgaagcgactggtgagcgagatctacggggggccacccncgctggcttccacccgtcggcctgcggcggcctggcgcactccgcgcccctgcccgccgccaccgcgcacccggcagcagcagcgcacgccgcacatcaccccgcggtgcaccaccccatcctgccgcccgccgccgcagcggctgctgccgccgctgcagccgcggctgtgtccagcgcctctctgcccggatccgggctgccgtcggtcggctccatccgtccaccgcacggcctactcaagtctccgtctgctgccgcggccgccccgctggggggcgggggcggcggcagtggggcgagcgggggcttccagcactggggcggcatgccctgcccctgcagcatgtgccaggtgccgccgccgcaccaccacgtgtcggctatgggcgccggcagcctgccgcgcctcacctccgacgccaagtgagccgactggcgccggcgcgttctggcgacaggggagccaggggccgcggggaagcgaggactggcctgcgctgggctcgggagctctgtcgcgaggaggggcgcaggaccatggactgggggtggggcatggtggggattccagcatctgcgaacccaagcaatgggggcgcccacagagcagtggggagtgaggggatgttctctccgggacctgatcgagcgctgtctggctttaacctgagctggtccagtagacatcgttttatgaaaaggtaccgctgtgtgcattcctcactagaactcatccgacccccgacccccacctccgggaaaagattctaaaaacttctttccctgagagcgtggcctgacttgcagactcggcttgggcagcacttcggggggggagggggtgttatgggagggggacacattggggccttgctcctcttcctcctttcttggcgggtgggagactccgggtagccgcactgcagaagcaacagcccgaccgcgccctccagggttcgtccctgggcccaaggccaggggccacaagttagttgggaagccggcgtttcggtattcagaaggcgctgatggtcatatccaatctcaatattctggggtcaatccacaccctcttagaactgtggccgttcctccctgtctctcgttgatttgggagaatatggttttctaataaatctgtggatgttccttcttcaacagtatgagcaagtttatagacattcagagtagaaccacttgtggattggaataacccaaaactgccgatttcaggggcgggtgcattgtagttattattttaaaatagaaactaccccaccgactcatctttccttctctaagcacaaagtgatttggttattttggtacctgagaacgtaacagaattaaaaagcaagtgcctgtggaaaacaagttggggttaatttggggggtcctgttgggctttttaaaaatttccttttttgggatgtgtaaatttatcaaatgaatgaggtaaagtggcgcaatgcctaaggctgtttgcctcacgtgaactgccaagcccccatcggaagtcctaagccggctttccctctattttgggtttatttttgcccacgtttaaacacaaatggtaaactcctccacgtgcttcctgcgttccgtgcaaagccgcctcggcgctgcctgcgttgcaaactgggctttgtagcgtctgccgtgtaacacccttcctctgatcgcaccgcccctcgcagagagtgtatcatctgttttatttttgtaaaaacaaagtgctaaataatatttattacttgtttggttgcaaaaacggaataaatgactgagtgttgagattttaaa

SEQ ID NO: 348 - DNA, 450 bp, Homo sapiens
tgagagcaagatgggtcaccagcagttgtactggagccacccgcgaaaattcggccagggttctcgctcttggtgagaaatagtttgtgattttggggaagcgttgccgtggagcgctaggctgcttaaaatctcaagtagaggaggccacgggcggcacgagggagcacgccgactgggagtcgctggtgccgccattacaggcctgtactgtggcttgggagtcccgggatgcgggtagtagccgtctgagtgcggagtcttgtaatttctatgacctgcaaaaccgctgtctcttttcttacaagtcgtgtctgttcaaaccggcacggtctgatccggaaatatggcctcaatatgtgccgccagtgtttccgtcagtacgcgaaggatatcgggttcattaagttggactaaatgctcttccttcagaggattatccggggcatc

SEQ ID NO: 349 - DNA, 337 bp, Homo sapiens
gcttgaataagaaaaacaaattcttcctcctaagccatggcatatcagttatacagaaatactactttgggaaacagtcttcaggagagcctagatgagctcatacaggtgggagactgaattaaaaatcaaacatttttatcttgatgggtttacagtaattcttgtcatatcacttaggcaaagagatatgaggtaaaatatcttggactatttgacccagcaagtcagtaacactgattaaattacctcaaattcttgtttattacactgtcctgacaacaggacacaaaacatgattgaatgatatcattaaatatagctaaatctgggtaca

SEQ ID NO: 350 - DNA, 424 bp, Homo sapiens
  misc_feature (1)...(424): n = a,t,c or g
ccgacttctggagagagatgatgcgggcgagctggttggtgagacaggacagccggcaccagcgaatcagacttccacatttggaagcaattgtgagtgggcgtggcccatagaccaagatcactgataagaaatgttctcgacagcaaggtaggagccaatcccaccagcattgactcagtcgtaattgggaaggaccaagaggtgaagctgcagcctggccaggttctccacatggcgaatgaactttatccatatattgtatagttcgaggaagaggcaaagaaccctggcctggaaacacacaggaagagaaagagatcacgcaacagcgattctatagaaagggatgctgctcatgaagctgaggctgggacagggctggaacctgggagcaactctggccaatgctctgtgcccctan

SEQ ID NO: 351 - DNA, 479 bp, Homo sapiens
cactttggttccagcatcctggtccagcaaagaagccaatcagcccaaaatgatacctggaggcttatcaagaggccaaacccgccactccagaaatcccaggagattgttgataaggttaaaccacagcttgaagaaaaaaacaaatgagacttatggaaaattggaagctgtgcagtataaaactcaagttgttgctggaacaaattactacgattaaggtacgagcaggtgataataaatatatgcacttgaaagtattcaaaaagtcttcccggacaaaatgaggacttggtacttactggataccaggttgacaaaaacaagggatgacgagctgaccgggcttttagcagcatgtacccaaagtgttctgatttccttcaactggctactggagtcatgatcctttgctgataaatataaccatcaataaagaagcattcttttccaaagaaaaaaaaaaaaaaaaagtaaac

SEQ ID NO: 352 - DNA, 307 bp, Homo sapiens
gcagcttcccgggcagacactctctccctcaggaagaggtgccgccgagtcaagcgcggggcagtgtgagcgccccgaggtgctttctcagttgaggagaggtggggttacagggcacaggtgacagggccggagaaagatggagcagcccggggcggcggcgtcgggagcgggaggcggcagcgaggaacccggtgggggccggagcaacaagcggagcgcggggaaccgggccgccaatgaagaggaaacgaaaaacaaacccaaattgcgtgaccgaattacaagttttagaaaatctactgtc

SEQ ID NO: 353 - DNA, 1605 bp, Homo sapiens
atgtgggaaagtttggaacttcctagagacttgttgaatggctttgaccaaaagcctgatagcaatatggacaataacgtccaggctgaggtggtctcagatggagaagaggaacttgttgggaactggagaagtcctcacaagttgagagagtgtctccccctcatcattttcctaaggaacagacttaagtatgccctgacaggagatgaagtaaagatttgcatgcaggggttcattaaggttgatggcaaggtacgaactgatataacctaccctgctggattcatggatgtcatcagcattgacaagacgggagataatttccatctgatctatgacaccaagggtcgctttgctgtacatcgtattacacccgaggaggctaagtacaaattgggtaaagtgagaaaaatctttgtgggcacaaaaggaatccctcatctggtgactcatgatgctcacagcatccgctaccttgatcccctcatcaaggagcaagccccaggccccgctcgcaactggggcaatgccagcagctttcctcgatcagatgggaagcccacagtcctctctctcagagcagccaccacagggagcacaggactggacttactctgcctcaacaaattaatgctaaaagaaggagaagaccctaaaagggttgcaaccgggatctggggcctgctgcctccaggaacagtgggattagtcctagggtggtctagcctatctagtaaaggaattaatgtgctcaccgtggtaattgatagtgattatcacagagagatattggttatgatggactgtaaaggtctgcatattcttccccctggatcaaagatagctcagttactgattttatcatactgggtccccagtctctatggaaaggaaagggggaagggaagttttgggagcacaggagccacaggagtatattggaatcaattaatcactgatcaaggacccatgaagaaattggaaataagaattttactggcttactgggcacaggggcagacatttcaatcattagtgatcaaaactggccagaaacttggctttggatatttaacccctgcagcaaaaagggaaattgaggaaatagaacaagccgtctctcaggggcagctagatcgcattgatccacgttattcaatccaattgttttatctttctcaccaaacactcccctacagggttaataggacagatggcccccgggctatgcttcctagaatgggttttttgccacataccgggactaaaacactatctccctatagtcagttacttactaaagtcatctattcaggccacaaacaatgcaatcagtcactaggttatgaccctgatgtcatcaggattcctttaagtaaaaagcaattcaaagcagtattgccagtatctattaatctgcaaatagctttctctgattacacaggacaaatagagcacatacttcctgctgataaactcctttatttcttatctcataccctggtaatcttacccacaaaaatagttcactcccccatacctaatgctttaacactgtttactgatggttctggtaaacatggaaaagcagcagtctggtag

SEQ ID NO: 354 - DNA, 383 bp, Homo sapiens
cttgcgtcaggaggggtagcataccaagcaatacaagctcttaaaaacatgggtgaaattctgaaagctgcgggctgtgacttatctaacgtggggacaacaactgttcttttgggtgacataaatgacttcaatactgccaatgaaatctacagacagtatttgaagagtaattttcctgctagagctgcttaccaagatgctgctttaccccaaggcatccgaattgaaattgaagcagtagctatgcaaggaccactgacaacggcattactataatggggcccagtgctgagaaaactgcaattgataacattttaatttttacaattgacgtaacatcttaattaaccttttaattttcacaatcgacgacagggtgg

SEQ ID NO: 355 - DNA, 385 bp, Homo sapiens
atgtgtgacttcatgaacctcagcctggcggactgccttctggtcaacctggcctacaagtcctccgtataaaggctggtggtgggagaatgctatcgctgccctgtttcggagacacattcccgtcagctggctgatccgcgctaccctgagtgagtcggaaaacttcgaagcagctgttggcaagttggccaagactccccttattgctgatgtttattacattgttggtggcacgtccccccgggagggggtggtcatcacgaggaacagagatggcccagcagacatttggcctctagatcctttgaatggagcgtggttccgagttgagacaaattacgaccactggaagccagcacccaaggaagatgaccggagaaca

SEQ ID NO: 356 - DNA, 367 bp, Homo sapiens
aggaagcccagtacatttttagttggtcgcggcttgggctccgctttggggaggggcagcaggtttattcactggatctctgaatacccaggccccctccaccatggccagccggggtgggggccggggtcgtggccggggccagttgaccttcaacgtggaggccgtgggcattgggaaaggggatgctttgcccccacccaccctgcagccttctccactcttccctattggcggcgtctaccccgggagctaaagatccgagtgcggaagctacagaaggaacggattacaattctgctccccaagaggccccctaagaccacagaagataaggaggaaacaatacagaaactagaggtgagga

SEQ ID NO: 357 - DNA, 425 bp, Homo sapiens
ctcatccagcgtggtggaattccatcccaaagatctaccagttctcttctgacaaagccatgccatcctgaaatgatggtcctctggggctggaggcagggctcgagccaggcctctgttggggcagggaggtgcctgattgagtctgctctgacctctcactctccccttcttctccaggctgctgctcctgctgccctgtgggctgtgccaagtgtgcccagggctgcatctgcaaagggacgtcagacaagtgcagctgctgtgcctgatgccaggacagctgtgctctcagatgtaaatagagcaacctatataaacctggattttttttttttttttttttggacaaccctgacccgtttgctacatctttttttctatgaaatatgtgaatggcaataaattcatctagcctaaaaaaa

SEQ ID NO: 358 - DNA, 1314 bp, Homo sapiens
atgtggctgtgggaggaccagggcggcctcctgggccctttctccttcctgctgctagtgctgctgctggtgacgcggagcccggtcaatgcctgcctcctcaccggcagcctcttcgttctactgcgcgtcttcagctttgagccggtgccctcttgcagggccctgcaggtgctcaagccccgggaccgcatttctgccatcgcccaccgtggcggcagccacgacgcgcccgagaacacgctggcggccattcggcagggttccccgatcttctcaggacggccttcccacttcctcattcgtccacaaggcacactcccggcccttgatcgctcccagtgtctagggatctccggacttgaggttttatatttacagaagacagcagatatgtatatagtttctgtgcgcctgacgctaaggttacatacagccaggaacaaggcagctaagaatggagcaacaggcgtggagttggacattgagtttacttctgacgggattcctgtcttaatgcacgataacacagtagataggacgactgatgggactgggcgattgtgtgatttgacatttgaacaaattaggaagctgaatcctgcagcaaaccacagactcaggaatgatttccctgatgaaaagatccctaccctaagggaagctgttgcagagtgcctaaaccataacctcacaatcttctttgatgtcaaaggccatgcacacaaggctactgaggctctaaagaaaatgtatatggaatttcctcaactgtataataatagtgtggtctgttctttcttgccagaagttatctacaagatgagacaaacagatcgggatgtaataacagcattaactcacagaccttggagcctaagccatacaggagatgggaaaccacgctatgatactttctggaaacattttatatttgttatgatggacattttgctcgattggagcatgcataatatcttgtggtacctgtgtggaatttcagctttcctcatgcaaaaggattttgtatccccggcctacttgaagaagtggtcagctaaaggaatccaggttgttggttggactgttaatacctttgatgaaaagagttactacgaatcccatcttggttccagctatatcactgacagcatgcttaccgcttctcacctttcaaccccatctgtggcctttgtccaggcccacagcttagccatggcttccctcctgcatccctgccgtgggttgctggcctcacacttgcagcagctggacagtgattttagaaggccaccagtccccatagctatgtga

SEQ ID NO: 359 - DNA, 1464 bp, Homo sapiens; identical to SEQ ID NO: 67

SEQ ID NO: 360 - DNA, 892 bp, Homo sapiens
tttcgtggctccgagccgagcgcgcggagcagctggggccggggcgcggatgctggaagttcacatcccgtcggtggggcccgaggccgaggggcccaggcagagcccggagaaaagccacatggtgttccgagtggaggtgctgtgcagtgggcgcagacacacggtgccaaggcgctacagcgagttccacgcgctgcacaagcggatcaagaagctgtacaaagtgcccgacttcccctcgaaacgcctgcccaactggaggaccagagggttggaacagcgccggcagggcttggaggcttacatccagggcatcctgtacctgaaccaggaggtgcccaaggagttactggaattcctgagacttcggcacttccccacagaccccaaggctagcaactggggcaccctgagggagttcctgcctggcgacagcagctcccagcagcaccagcggcctgtcctgagcttccatgtggatccctatgtttgcaacccctccccagagtcgctgcccaacgtggtggtgaatggtgtgctccagggcctctacagcttcagcatcagcccagataaagcccagccaaaggcggcctgtcgccctgctcctctgccaccgatgccctgatcagtccagaggcctttggctgcctcttaagaaagtcatgtgcctctgtcctatgaactccatataaggctgggtcctcctttggcctggacccaggacttaattacccagtgcccagttgtgccacattcccactcaaggctcagaacttggctcgcattggtagctggaggtggtagaatttgtatgctcttagagcccaacagccaaggcagggtcaagaagataagtaataaaagagtaagtcagccaggatgtatt

SEQ ID NO: 361 - DNA, 302 bp, Homo sapiens
  misc_feature (1)...(302): n = a,t,c or g
cggcgcccgaaggccaggttcatgncgtcacactgaagtcccaggtcctcggaggtgtcgcgaaggatgcagtccacaagcacccacaggttggccgagtccagggcgctcgcgctgggcgtggcacagattgtcctgtgtgaacttggtccgggtctctggggtggaggcgctgcggggccgcttctcaaaactcttgcacaataggttgagggacttctctacaccaggaccanaganttattcgtttcttgccgctcttggaaacacccagaggacactggaaacatagccacagggac

SEQ ID NO: 362 - DNA, 822 bp, Homo sapiens
ccgcctgccttttaattcagtgttcccatgagcgccaaggccccattattgcccccttgctcccactccatgctgcttctgggtgggacctaagatggcttgggagttgttgggttcctgcgatcagaagtctaccccaccacctcctcaggaaactgctgcctcccctaagaattttccttgccctggagtagggggccagagcactttgatttccagccatttactccaagtcctctccccagctaccaccagtcccttactctgttctcccccagtgaaaaagagtctgttgattttcctcaaaactgctttattaggaatgtaccagggattgagttaggggagttggacagccccggctcctataggagtcctacttctctccagcatcctgtgccatcctcttgacgtaatcgctgtacattgtgtacacagcacctgtgtgagagaaaagaaataatgccccttggcatcaaacccttcacccgtcctctggctctcaggcgtcccaggggttcacctctagctgctcccttgagagtccagcttcccgctcatctttctgccccaggtcccaacagctgcttcaagcatctgaccacacaacctggggaaaccacttatctgacagttcacgaaacactttcacatgtattgtgtatctgagaaacctcacagcagcctgcaaggtaggcaggccaggggtggttattgtcatgttacacatcaggaaactgaggctcagtgagaaagatttgtccactgtcacacagttagcaagtggctgtctgctttttaatctcaagaaaaaaagaaatt

SEQ ID NO: 363 - DNA, 402 bp, Homo sapiens
aaggtgcacatgaatggcctgcgatatgctctatacattatggggcctgcccttacgagaggctgccaccaggtgcttattatgctatgctgcgaagtaatagaacggatcttgacttgatgatgaaggaagcttactttggcgaagtggatatcatggacgacctccctactgagaaatattagcgctaacgtcacaggcaggctatacaagtgtggggtgatcaaccacacagttgacctgcgccgtatgaaaacggaaaatggcagaataatctgcttccatcccgccagtttggtttcattgtactgacaacctcagctggcatcatggaccatgaagaagcaagacgaaaacacacaggagggaaaatcctgggattctttttctagggatgtaata

SEQ ID NO: 364 - DNA, 411 bp, Homo sapiens
  misc_feature (1)...(411): n = a,t,c or g
gcgagcactataagacggcggtgtttccattcggtgatcagcactgaacacagaggactcaccatggagtttgggctgagctgggttttcctcgttgctcttttaagaggtggccagtgtcatgagcagctggtggagtctgggggaggcgtggtccagcctgggaggtccctaagactctcctgtgtagcgnctaaattcatgttcagtaannnnnnnnnnnnnnnnnnnnnnnnnnnnnnnnnnnnnnnnnnnnnnnnnnnnnnnnnnnnnnnnnnnnnnnnnnntgataaacactatgcagactctgtgaagggccgattcaccatctccagagacaattccaagaacacgctgtatctgcaaatgaacagcctgagcgccgaggacacggctgtatattactgtgcg

SEQ ID NO: 365 - DNA, 3589 bp, Homo sapiens
tttcgtgccaggaggcaggggaggctcggcgaccctgtcaggcgctgcgggacgccgaggactggggcggcgtgctggagatccgcggccaaccgtggggtgctgctgtcgggactcataggtgtcgtctcctggaagaggcctctctcccttgtgataacctttttcatgctgctttctgcagtgtgtgtaatgctgaatttggctggttcaattctctcttgtcagaatgctcagctagtcaactccctagaaggctgccagttgattaagtttgacagtgtggaggtgtgtgtctgctgtgagctgcagcaccagtcgtccggctgcagcaacctcggggagacgctgaagctgaacccgctgcaggagaactgcaacgctgtgaggctgaccttgaaggatctcctcttcagcgtgtgtgccctcaacgtcctgtccactatcgtgtgtgcgctggccacagccatgtgctgtatgcagatggtctcctccgatgtcctgcagatgttccttccgcagaggtcacatcctgccaaccccacctgcgtgactcctcacggcaccgttctccaccagaccctggatttcgacgagttcatccccccactcccgcctccaccctattaccccccagagtacacctgcacaccgtccactgaggcccagaggggcctccacctggactttgctccgtctccattcggcactttgtatgacgtggccatcaatagccccggcctgctctatcctgctgagctcccccctccgtacgaggcggtggtgggccagccccctgccagccaggttacaagtataggtcagcaggtggccgagtccagctccggggacccaaacaccagtgctggcttcagcactccagtaccagctgacagcacaagcctcctggtgtccgagggcactgctacgccaggttccagcccatcccccgatggccctgtgggcgccccagcaccctccgaacctgcccttccccctggccgcgtgtctccagaggatcctggcatgggctcacaggtgcagccaggtcccgggcatgtgtcccgctccaccagcgaccccaccttgtgcacatctagcatggcaggcgatgcctcttcacacaggccgtcgtgtagccaggacctggaagcgggactgtctgaggctgtgcctgggagcgcttccatgtctcgctctgccacggctgcctgtcgggcccagctttcaccagcgggggacccagatacctggaaaactgaccaacggccaacaccagagcccttcccagcgacctccaaagagcggccacgctctttagtggacagcaaggcctatgcggacgccagggttttggtggccaagtttttggaacactcacactgtgccctccccaccgaggcacagcacatggtgggtgccatgcgcttggctgtcaccaacgaggagcgcctcgaggaggaggccgtcttcggcgctgatgttctggaccaggtatgaaggagccacatttctgaccgtggacaccaacgcctggcgccacagatgttcttggcagaagccatcatgcctgacaaagaggccttcaggcccagcttggcggaggataaatgtgggggggacacccaggatgatctgggggcggtgtgggcagggaactgttaccccctctctcgaggggagccgagcagtgtctctttggggattgcatttcctgcctagcccagtaattcggaaagatgactttcacgtccacagtgaactctctggttttatctgggcgtgcagcaccttgaactgaggcagtgttgcacaaatgtgaatacagcaacaggcgacacttacgtcacctaaagattcaaagtatctccaaaatcaggggccttccaaaggcagggagtcttccccatcccccatttaaacttagtgtttcagttgggacagaggggttgacatcgagttcatggaaacattttcttcatgtgggctcgatggctctattcttagggcgtttcatcacggtctgggcctatttcctgtgaaaggaaataggtagtgttagcacagatggcagcctgggcccaactttctgtccacagggctattgtgcaaacaaatgtgcagtgcgggcctctgccatagcccggccccccccagggaacaggccggtgttgcgggggttggaggaacccaccatctcttgggccttgagctcggcctccctccgtggggtgccttccccccctcctcttgggccccctttctccaggctcccatcctgtccctgggagcagttgtgtgatccgtaacaacaagtgccgattcccagctcctttgtgtctgagctcacttgattgagctcagcgggtcacagttcttgcaggagagaggccggtttctctgagaagtagcccttcctgattaaagcaggtccctttgacccagagctgacctttccccgggcatgcggcagcagacacacctgcgcaggaggatcataaaccacttacaaacccacgcgagaagggaagcagacacccaacgtgctgcttatgggagaagcagacacgcccagcttggggacagcctgggggaccttgggacttttttagcccccatcccttgttttcttgttggcatcagtggcagctgctcccaacaatggccgtggaacagcgccatccacgagaactttgtgcagtgatggaaatgcctgttcagggccactagcagccacagcccctgagctgcgttgggtgggccctgcggtgaacaaaacagcctagaggccaaggtctccccagagagcccatgagcctggcatgggggcacagggggaccagagggtgtcttccactcctgggtgccagggcagggggctcacgctgctgttccctcggctttgtggggcttgtccttgagctcccccaattccctaatgccactgtggccagtgtgctggggagcttctgtgtggctggaagctgggaagggggtgaggttccaatccaggtgcccagagccttcctccagtcctttatccctgccctgggggctgcggtgtgggactccttcagctgtggtcggctgaaaaggcttcgattgctttagagagctgaaaacacataagccaggccttttgatgacaacctgcacttttgcaggagagacgtactagagatgaatttttgagcactttattcagactataaaacaggaaatctctaattttcctcaagtgggggcttttgaattccctcaaggcaagtccctttgcaggtgaaattaattggtggattttcagaatggccgccctggagccgagctttcagccacgcctgacgccctggcctctgaatctccactgtctctgaggtgcgctggggccacaccgcaggggtttcacctgcttgggggggtccacactagggcttgggggttcacacagcattgtccctgggctgagcccttgggtgggctagagctgcagtcctcagacatggctgcaattccagcgaggccaagaccaccagccacccagtggacttcgggtctctggggtgttctcctcatgcagccggggcagagg

SEQ ID NO: 366 - DNA, 291 bp, Homo sapiens
tcttcaagcaatcactatgtcaacagacacaggtgtttcccttccttcatatgaggaagatcagggatcaaaactcattcgaaaagctaaagaggcaccattcgtacccgttgtttttggagacagtcccgctctgtcgcccaggctggagtgcagtggcaggatctcggctcactgcagcctctgcctcctgggttcaagtgattctcctacctcagcttcctgagtagctgggactactcccgccaccacaccaggctgatttaatgtgtttttagtagagacggggtt

SEQ ID NO: 367 - DNA, 497 bp, Homo sapiens
gagtacgtgactgtacggaggattaacctagaagcttgttccaatgagatggtaacattcttgcagggcgagctgcatgtctccaaactcttcaaccatcccaatatcgtgccatatcgagccacttttattgcagacaatgagctgtgggttgtcacatcattcatggcatacggttctgcaaaagatctcatctgtacacacttcatggatggcatgaatgagctggcgattgcttacatcctgcagggggtgctgaaggccctcgactacatccaccacatgggatatgtacacaggagtgtcaaagccagccacatcctgatctctgtggatgggaaggtctacctgtctggtttgcgcagcaacctcagctgccctggtgctttctccaagggccatcagtgtcttgcctagcttgagggcttaagtccttatgctgtgttagtttcgttgtcagaacaaattaaaattttcagagacgctgaaaaaaaaaa

SEQ ID NO: 368 - DNA, 1266 bp, Homo sapiens
atgcctccaggcgtcttctctggcttgaccctcctcaggctaaacttgaggagtaaccacttcacctccttgccagtgagtggagttttggaccagctgaagtcactcatccaaatcgacctgcatgacaatccttgggattgtacctgtgacattgtgggcatgaagctgtgggtggagcagctcaaagtgggcgtcctagtggacgaggtgatctgtaaggcgcccaaaaaattcgctgagaccgacatgcgctccattaagtcggagctgctgtgccctgactattcagatgtagtagtttccacgcccacaccctcctctatccaggtccctgcgaggaccagcgccgtgactcctgcggtccggcccaatagcaccggggcccccgcgagcttgggcgcaggcggaggggcgtcgtcggtgcccttgtctgtgttaattctcagcctcctgctggttttcatcatgtccgtcttcgtggccgccgggctcttcgtgctgaaacccatcgattattatggggaaatctgtgacaatgcatgtctctgtgaggaaaaggacggcattttaactgtgagctgtgaaaaccgggggatcatcagtctctctgaaattagccctccccgtttcccaatctaccacctcttgttgtccggaaaccttttgaaccgtctctatcccaatgagtttgtcaattacactggggcttcaattttgcatctaggtagcaatgttatccaggacattgagaccggggctttccatgggctacggggtttgaggagattgcatctaaacaataataaactggaacttctgcgagatgataccttccttggcttggagaacctccagtacctacaggtcgattacaactacatcagcgtcattgaacccaatgcttttgggaaactgcatttgttgcaggtgcttatcctcaatgacaatcttttgtccagtttacccaacaatcttttccgttttgtgcccttattgcacttggacctcccgcggaaccggctgaaacttctgccctacgtggggctcttgcagcacgggggtcctttagagtcgcacaaaacagggcattcaagccctcactttcgggacagcaggctacgggaaccggtgctctacagccccccgagtgctgtctttgtagaacccaaccggaacgaatatctggagttaaaagcaaaactaaacgttgagccggactacctcgaagtgctggaaaaacagaccacgtttagccagttctaa

SEQ ID NO: 369 - DNA, 1207 bp, Homo sapiens
tgaggatctgtgaccccagccataaggagccttgccctccttgctgccattctcctggtggccctgcaggctcgggcggagccactccaggcaattgctgatgaggctacagcccaggagcagcctggagcagatgatcaggaagtggttgattcctttgcatgggatgaaagagctcctcttcaggtttcagggaagtcctctcctgtttgtgcacggctgctcttgctacaggagacccgggacagaggactgctgtttgccctccctcttcactctgcctaccttgaggatctgctcaggcagagccacttcaggcaagagctgatgaagctgcagcccaggagcagcctggagcagatgatcaggaaatggctcatgcctttacatggcatgaaagtgccgctcttccgctttcagcctgataaaatcattgtcctctccaccctgattcctacaggagactactcaccccataacctcaaaaacctcttcatgaggatggtgacccccagcccatgaggaccctcgccactccttgctgccaattctcccctggtgggccctgcaggccccaggcttgagccgcgtccccaggaaagagctgatgagcgttgctgcagcccccggagcagattgcagcgggacatccccagaagtgggttgtttccccttgcatgggaccaaaagcttggctcccaaagcatcccaggctcaagggaaaaccatggactgctattgcagaataccagcgtgcattgcaggaggaacgtcgcttatggaacctgcatcttaccaggggaagactttgggcattcctgctgctgagcttgcagaaaaagaaaaatgagctccaaatttgactttgagagctacagggaattgcctattactcctgtaccttcttgttaaatttcctttcctaatctcaaataaatgccttgttacaaaggccctatctcaaaaaaaaagccacccggcccgaaattccaaaattttgaatcggaaaacctggaaaaccccggagggtccttttaagggggcattgggccccatttaaatttttttaatttaaaacacggttgggcctttttttagggaccaaacccccttaaagtcaattttgggcagggaccctcggtttaaaaatttttaagggccaaaataggcgccattttttttggcccaaaattttaggaaaaaaata

SEQ ID NO: 370 - DNA, 497 bp, Homo sapiens
  misc_feature (1)...(497): n = a,t,c or g
ggcacgagccttaatctagcagtaatttatcaaaaacccatatgataagagaattattttataatagtgttggtaaagaaaatctaaaatagaaaaaacatgccaacaattgattggctaatgaggtgggtgatgccagatgcaagactgctgggcctaccacaggagcaagagagaagccatgcattccatctcaaggcatctgtgagcccatgtagacaccatgagcaaagctcaccctcctgagttgaaaaaatttatagacaagaagttatcattgaaattaaatggtggcagacatgtccaaggaatattgtggggatttgatcccttaatgaatcttgtgatagataagtgtgtggagatggcaaccagcgggcaacagaagaatattggaatggtggtgatacgaagaaatagtatcatcatgttagaaaccttggaacaagaataaataatggctggtcagcagagaaattncacgtcccctcttcaaa

SEQ ID NO: 371 - DNA, 2004 bp, Homo sapiens
  misc_feature (1)...(2004): n = a,t,c or g
agggattnnnnnatctggagngactggagaactgtcncggaannccngggacgacccacgcggacggccaaccactcggggcgacctcgggtgcctcgctgaagatacagtcaagctcccaaccgctccagagcggccaggtgcttgcctctgctacacccactccatctgcaccccccacctcccagcaagagcttcaggccaaaatcctcagcctcttcaatagtggcacagtgacggccaatagcaagctctgcatccccctcggttgctgccggaaacaccccaaaccagaatttttccacaagcaagcaaacaagccaagcctcaacaaagatcacaggcttctggcaatcagcctccaagcattttgggacagggaggatctgctcagaacatggggccccagacctggggctccttaccaagggctttttggccagccttccagtcgcctggcacctgctagcaacatgactagccagaggcctgtgtctttcacaggtatcaactttgacaatccaagtgtacagaaggctctggataccctgatccagagtggccctgctctctcccacctggttagccagaccacagcacagatggggcagccacaggcccccatgggatcttaccagaggcattactgaagctaaatctttcaactctccccagtcccctcatcccctggcctcctcccacttacttgttctaaatagagctgtttggaggatgttctctgcgctcccaggccggcatcgagtgtcatcaatttctaccacctgctctctcttctgcccaaggctgtgttgcttattccttacaaagtttatactgcatttggggctgtatctttttttgttttttgttttgtagaaaataaatatctccgggggcagtacaggtgtctgggcttgtatttgatggggtttctccggtccctgtttctactggatttggagccaggcccagctagccaagtttggaatggcatttgtcatgtcagtagccaccacctttgttcattgtgaacctaccaaggctttccagcttcatacacattgaccagagctcaagctcctgcctgcaactcctgcctagagttgaagaaaagcaaactagccttggcaggcacagtgtcatcataccctcaccccatatgtttggggtctgcttgaggattcataaatcagccactctggattgttgaggaatggccatggcagccacagaaaaaagaatttttctctctgagccaaggttgtttttttgtttttttctcttttcttttttgttttcatttcattgggaagatctccaatgggactggaacagctccagttcaggcaggcagtttaccacaaaactgtggaatctggggccccaccactctttccctgtttaaccagtttctgttcaggcatccccctctccagcaacactttcatgaagttggttctgagactctggccgcgaacacccgtttcttcagtgatttgttttgggcttttggctcaaaaccccaggctcttgtttttgtctagactcttattctgtttcctgagcagcaggaggtagggaccactttgatgtcagacttctggtagctggacatgttctcgagatgggtggctgttccccgactttttgtacccaagagtgaaattgttnagaaaggagggtttcctggctgtggttcctaaatggagccccaggaaagttgccttctcccccagggttttgtgctcagtaagaaccctgtggatcacagtcttgaaggtcctctagcaggggtgagggagagcagcgacttcagctgagtccctgccgagtggttaagcaaacaatggtttcaaaattcaaggtccccaaatggcagcattttatgttctgacctgtttgtgttatatagtggtttttttttttcctctttggaactcttgtgttgttaataaaatgaaatgattactttttaattaaaatgaaaaaagtaaaaaaaaaaaa

SEQ ID NO: 372 - DNA, 446 bp, Homo sapiens
ccctgttcttctttacctaactctatagcagtaattggtacatttcttccatcaaagtttcatatttttagcaaagtatcaagcctttccgtacggaaagctgcatccacaagattggagggaagcaggtttctgttgtaaaagaaagcattctgtcagtattcttttaaaacaattttttagagatgaggtccctgttgcccaggctggagtgcagtggtgtgattgcagctcactgcagccttgaacttttgggctcaagtgatcctcctgcctcagcctcccaaagtgttgggactacaggcgtgagccatggtacctgtcttcatcagtattcttaaaattcagtgtgcaaagtatctgctttgagatgtccacttctaaaaccctaacacagtgttctctctccacccctagctgacactgcaccttttgcttctcgtgcc

SEQ ID NO: 373 - DNA, 1816 bp, Homo sapiens
cttctctgccagaagataccatttcaactttaacacagcatgatcgaaacatacaaccaaacttctccccgatctgcggccactggactgcccatcagcatgaaaatttttatgtatttacttactgtttttcttatcacccagatgattgggtcagcactttttgctgtgtatcttcatagaaggttggacaagatagaagatgaaaggaatcttcatgaagattttgtattcatgaaaacgatacagagatgcaacacaggagaaagatccttatccttactgaactgtgaggagattaaaagccagtttgaaggctttgtgaaggatataatgttaaacaaagaggagacgaagaaagaaaacagctttgaaatgcaaaaaggtgatcagaatcctcaaattgcggcacatgtcataagtgaggccagcagtaaaacaacatctgtgttacagtgggctgaaaaaggatactacaccatgagcaacaacttggtaaccctggaaaatgggaaacagctgaccgttaaaagacaaggactctattatatctatgcccaagtcaccttctgttccaatcgggaagcttcgagtcaagctccatttatagccagcctctgcctaaagtcccccggtagattcgagagaatcttactcagagctgcaaatacccacagttccgccaaaccttgcgggcaacaatccattcacttgggaggagtatttgaattgcaaccaggtgcttcggtgtttgtcaatgtgactgatccaagccaagtgagccatggcactggcttcacgtcctttggcttactcaaactctgaacagtgtcaccttgcaggctgtggtggagctgacgctgggagtcttcataatacagcacagcggttaagcccaccccctgttaactgcctatttataaccctaggatcctccttatggagaactatttattatacactccaaggcatgtagaactgtaataagtgaattacaggtcacatgaaaccaaaacgggccctgctccataagagcttatatatctgaagcagcaaccccactgatgcagacatccagagagtcctatgaaaagacaaggccattatgcacaggttgaattctgagtaaacagcagataacttgccaagttcagttttgtttctttgcgtgcagtgtctttccatggataatgcatttgatttatcagtgaagatgcagaagggaaatggggagcctcagctcacattcagttatggttgactctgggttcctatggccttgttggagggggccaggctctagaacgtctaacacagtggagaaccgaaacccccccccccccccccgccaccctctcggacagttattcattctctttcaatctctctctctccatctctctctttcagtctctctctctcaacctctttcttccaatctctctttctcaatctctctgtttccctttgtcagtctcttccctcccccagtctctcttctcaatccccctttctaacacacacacacacacacacacacacacacacacacacacacacacacacacacacacacacacagagtcaggccgttgctagtcagttctcttctttccaccctgtccctatctctaccactatagatgagggtgaggagtagggagtgcagccctgagcctgcccactcctcattacgaaatgactgtatttaaaggaaatctattgtatctacctgcagtctccattgtttccagagtgaacttgtaattatcttgttatttattttttgaataataaagacctcttaacattaaaa

SEQ ID NO: 374 - DNA, 1104 bp, Homo sapiens
gacagtttactatatttctacataatattgtgctttaatgaatcttcataatgatgagtttagtcatcaagcaaagtttaagtcataatctcccctctaggaaaaatttctaagttcatagcctacgtgtgtgtatgtgtgcgtgttgaaacagaagtgtgtgtgtgtgtgtgcatgtgtggcgcgtgctgcctgcacggcgtgccagttttctgtgtttgtgtgtttgaaaaccgtgtgaggatttaactgtggggttttcccctgtattcaagtatacgctttttttttttggcgcattgggtcaaacggttgttattattagcctcctaactttgcactgagtgtcctcgcccttcctttagcttaatcctatacattacaggaggattcctaggacaggggtgggcgacaattcatgtgtaaatgtttaactcaagggacctctgtgactgcgtttaaaaaaggtacagtgtatatctctggagaaataacatgtataccttacctttagcagcctttttattgtggacctaatgccaagaaaattattccccagagtattgcacccatttttcccatttgggaatataaagttaaagagaaaaaaaaaaaaaaactgttgttgaactgtggcccatagatacttgtaaagaatggatggttccgtggaaggaacagaaacaagcacttgggcgtgggttgtgactgcttttgggggagcctggggtttgggctcccacctgtttacagacctttttttctccttcagactttaaaattttaaaaatttaaaaaggaattaaaaaaaaaaaaaaagacttccgccgaaaagaaacctattttcaaaaggcatatgcgttcttttaaagctttgggacggaacagggttgttccctcggccatcggcggggactttgtcgatttgctttcgccccttcgtcaaggtgacaggcgttgtggccactgtcttgcacatgccggacgcgctctcaggaaagccagggctcccgagggcagctccacaccatttcatgtatttttaaacccaactcctagcactgaagatgttatttaaaaaaaaaaaaaacaaaacaaaacaaa

SEQ ID NO: 375 - DNA, 840 bp, Homo sapiens
agcggagccctttattggaatggcttccaaccctgtgtttttataatggtaaaggactagaacagatagaaagagataacagctttcataatgtggcagaagctacgtttacactcaagctgattcaatcactgattgcaagtggaatagcaggctctatgattggtgtgataacattatacaaatcccagatgtacaagctttgtcatttactcagtgctgtggactttcaccatcctgatattaaaactgtgcaggtgtccacagtagatgctttcaaggaagctgaaaaggagatcattattctgtcctgtgtaaggacaagacaagtaggattcattgattcagaaaaaagaatgaatgttgcattgactagaggaaagaggcatttgttgattgtgggaaatttagcctgtttgaggaaaaatcaactttggggacgagtgatccaacactgcgaaggaagggaagatggattgcaacatgcaaaccagtatgaaccacagctgaaccatctccttaaagattattttgaaaaacaagtggaagaaaaacagaagaaaaagagtgaaaaagagaaatctaaagataaatctcattcataaaaagacatggtgtaaatattttgtatttatgtaaattcagactcattttacatgatatattttttatatttttattactctaaaccctcttattaaaaatatgatatttaaataacatagtaaacacatgtaaaaattttgttcttcaaaaaagtgtacacaaggtagtataaaatcctactcatcaaaataagcttttttctacacaaaaacaaacaaaacacaacaacaaaac

SEQ ID NO: 376 - DNA, 455 bp, Homo sapiens
ggaccaccaccgcgcttgggctgttgaccatccccatcattatccaccccattgacaggtcggtggatttcctcctggactccagcctgcgcaagctctacccaacagtggggaagcccagctcctcctgatcatactctggtacctggcctgtgcatcggcctcctgcttcatgtcaacctcctactcctgccagggaatgtggacacctggctccctggtgtccaaagaccctggcacctgggtgggtttgagctggacagaagcttagagacaaaggcttcaagaagcagtggctgcagggagtcacagaagggcaggacctgaacgctgtctgcttccctggaatccaagatgctgagtggaagtggaccctgggtgggcccggccctgtctttttcaggacagattctctggccaggcccttccctgacccaataaatcctgaaaaggtt

SEQ ID NO: 377 - DNA, 501 bp, Homo sapiens
tgccttcagagttcgttgtgccgagctctggagatcctgcggacaaggtcctgcagatgcttcttcaccgtgtagcccagctccttggtccgcccctccagcagggcgtgcttctcgcggctgcggctcacacgctcgccgtcgcccacgctctctgcgtgcctcagcttctcgtgcgcaatctccagctgcttctggtagtggttgggcttccccaatttggcctgcaagttcttgaagctcttcgcgaaacgcttcagcttcttgtccgtgaagttggcggactgcgccaggtcccacaggtcaatcaccctgggctcctcgaactcagcctcagtgctgtagccctggtggctgaccctgcgcaggcggtccaggccctggttgatgctgcgcagcttctccttcagctccgtgtgcctgctgtgcaggacgctgcacttgatcttcacatcaagctgacagcacgtaagaggcccatgccatgagcaatccccgagg

SEQ ID NO: 378 - DNA, 1867 bp, Homo sapiens
  misc_feature (1)...(1867): n = a,t,c or g
ccttcctcaccccgtcccctgagtcccctgaccagtggtccagctcgtccccgcattccaacgtctccgactggtccgagggcgtctccagccctcccaccagcatgcagtcccagatcgcccgcattccggaggccttcaagtaaacggcgcgccccacgagaccccggcttcctttcccaagccttcgggcgtctgtgtgcgctctgtggatgccagggccgaccagaggagcctttttaaaacacatgtttttatacaaaataagaacaaggattttaattttttttagtatttatttatggacttttattttaacccagaaacactgcctttttatttatatgtactgttttatctggccccaggtagaaacttttatctattctgagaaaacaagcaagttctgagagccagggttttcctacgtaggatgaaaagattcttctgtgtttataaaatataaacaaagattcatgatttataaatgccatttatttattgattcctcttttcaaaatccaaaaagaaatgatgttgggagaagggaagttgaacgagcatagtccaaaaagctcctgggggcgtccngggccgcgcccttttcccccgacgcccaccccaacccccagcccagccccggcccgcttccaccagcatcaacctgccctgtttagggagaagctggcattccagagggcaaacgggagggcaaagctggcttcacctttccggcacggcggatttaattttgcatctgaaaattagggaaacaagttgaagcatatggggttagatgttgccatgtgttttagatgggttctttgcaagcatgcttgtggaaaatgtgtttttcggagtgttgttattgccaagagttgcacccatgggtaccaatcatggaatcttttgtttttcaggtttcagtatttatgtagttgttcgttgggttatacaagttcttggtccctccagaaccaccccggccccctgtccgttcttgaaatgtaggcatcatgcatgtcaaacatgagatgtgtggactgtggcacttgcctgggtcacacacggaggcatcctacccttttctggggaaagacactgcctgggctgaccccggtggcggccccagcacctcagcctgcacagtgtcccccaggttccgaagaagatgctccagcaacacagcctgggccccagctcgcgggacccgaccccccgtggggctcccgtgttttgtaggagacttgccagagccgggcacattgagctgtgcaacgcccggggctgcgtcctttggtccttgtccccgcagccctggcagggggcatgcggtcgggcaggggctggagggaggcgggggctgcccttgggcccaccccctcctagtttgggaggagcagatttttgccaataccaagtattagcctatggcagaaaaaatgtctgtaaatatgtctttaaaaagtggcattttgtttaaaaaatcttaatgaatggagtctgttgtgtgtcatgccagtgagggacgtccagacttggctcagctcggggagccttagccggcccatgcactggggaacgctccgctgccgtgccgcctgcactcctcagggcagcctccccccggtctctacgggggtccgccgtggtgcccatccccagggggcatgacccagatgcgtccccaagatgttgatttttactgtgttttataaaatagagtgtagtttacagaaaaagactttaaaagtgatctacatgaaggaactgtagatgatagtaatataatcatctttttttgttaactgatttgcaataaaaatgatactgatggtgatctggcttccaaaaaaaaaaaaaaaaa

SEQ ID NO: 379 - DNA, 1935 bp, Homo sapiens
gggtcggaacaagcatcttccgtttcgagccacgcgtccggagaatttagattcacgtcagaagttcccattcgatttgattatcatggcaaacatgtatcaatggatcaggggacgctagctgggattttgattggtctggctcagttaaactgctctgaactaaagctcaagaggctttcctatcgacatggtttactaggcgttgacaaattattctcatatgcaatcactgagtggcttaatgacattaagaagaaccagctaccacgaatcctgggaggtgttggacctatgcattcactagtacaattagtacaaggcctaaaggacttggtctggctcccaatagagcagtaccggaaggatggccgcattgtcagagggtttcagagaggcgctgcttcctttggtacctcgacagcgatggctgctctagaactcacaaacagaatggttcaaaccatacaggcagctgcagagactgcttatgatatggtgtctcctggtaccctttctatcgagcccaagaagaccaaaaggtttcctcatcaccggttagcccaccagccagtagacctgagggaaggtgtggccaaggcctacagtgttgtgaaagagggaatcacagacacggctcagaccatttatgaaactgcggctcgagaacacgagagcagaggggtgactggtgccgtgggcgaggttctgcgccagattcctccggcagtggtgaaacctctgattgttgccacagaagcaacgtcaaacgtgctgggtggcatgagaaaccaaattaggccagatgtccggcaagacgagtcacagaaatggcgccacggggatgactgatggcttggaacttgacagtgtgaagataaggagagtggaacccaggagctcagagtcctgacagcagcttcagaggaagctcgtttaattttattgtgctcatctcaggaacaaaagcattttttagttaaataatttaacatcaaaacaacatgcaaccaaaaacttctgacatttatagttgatacttgcctatagaaatgtttggtggctggtgtcaaaggtccttaaagcatttgctgccaagttagtggaaggctcacttttgttaagatgactgtaattctccttgttaccgacgagagatcattggaagctgccttctaacactttgtgtagctctgtggagttggattttcttaaggtttaaaaagaatcacagcttcggaacttttaactgaaaatgagagacagaagccacaggggaagcaaagcaaataggattttcaatacaaatatcagtgtggaaaaataacctattctgttgaatttagtgttcatgcacttgagaaccaccattatttccatttactccgaaaatccttctgtgggggtttgagaaagtgaatgttgcagacatgttctgttgtgttgcactttatcctgtgtttatgtgtatgtgtttttagattaattcaagttgtgtgctatatttcttgtataatttacaaagttacacaaaatattaaagagcagtaaacattgtctgaaagtttttgggcaaagggaaggtaacttccaatgtaattaggcttccctttaaggagtaccgggaaaatgccttctgtaatggaagtggggcccctgtaattgtttatattttcagttttaagcaggtatagtgcaggcttgttaggaatgtgtggaagggaagattggaagtgatttttcctcttttaaaagtaaacaaaattcttcaaatatgccctagttaactatttcagcatacccatttttacttgggttaaccagtgtacattttggataaccctatccagggaatggaattaaagtattttttattttaaagggtggatattgttttatggcttcccctggaatattttggcttttccttagggg

SEQ ID NO: 380 - DNA, 329 bp, Homo sapiens
ccgtctcaccccagctcctttggctccgcaccccacccacacctgctgcccaccaccccggcagcacctttccctgcccaggcttcagagtgccctgttgctgctgccactgccccccacactccagggccatgtcagagctcccatctaccctccaccagcatgccgctcctgaagatgcccccaccattctcggggtgcagccacccctgcatcgggcactgtggtgggcactgcagtgggccttctcctcctaccctctagctgtgaggctgtccctaactctgacaggtatgggcgtcggatgagggtcaatgtatcctcccacg

SEQ ID NO: 381 - DNA, 1417 bp, Homo sapiens
ctgaactcaaaacttttagctgttcattgcttcatgatggagatccaacttaccagcgtttatttttggactgccttgtacattcattgcgggagcttcatacaggagatgttatgattttgcctgtactttcttgcttcacaagatttatggctggtttgatctttgtactccacagttgttttagattcatcacttttgtttgtcccacatcctctgatcccctgaggacctgcgcagtcctgctatgtgttggttatcaggaccttccaaatccagttttccgatatttgcagagtgtgaatgaattgttgagcactttgctcaactctgactcaccccagcaggttttacagtttgtgcccaatgggaggtactccttaaggcggccctgcttgattttttgtgggatttgaatgctgccattgctaaaaggcatttgcatttcattattcaaagagagagagaagaaattatcaacagccttcagttacaaaactgaacatatgctttctgagattcaactttatgatttcttataatttgcccagtatttgcatcctgttgctctattaatttaaaaaccttttattttggggaaaggccaacaatttgcatcattcaaagtctcattaattctggaaaaccatccattctgatctctagggtatatacacccacagggcatagagctcttccacgtgggtggaatctatgcaatgatagatattcacactctaaatatgagggtgtgtgtatgtgtatggggtggccacagccatgcttacctatgccatttagttggtcttacttaatctgcttaagatttgcatctgtgtacctttgttcagattagtttttttttttccagccgatttcctcttagtggctaatgctgttagtgaattttccaactaatttcctctcattggttaatgttgttaatgaattgagagaggtaattgaggaaaggaaatgagtaaatcactgttcagcaacactgatttccgttaacacatcagttatgaatttcagggaattcatctcgccagattcttgataacatgccattcattgcccttaggtgattgaccctattttcttacatggctcaaataaaactagtatgctgttgtatgaatcttttactgaccacaccatccaactataaagatataacgggacagctttaaaccaaagatcatgtttagaacaatgaaaaattatttgttgtatctaatacacgcctgtattgtgaaaagcttcatttagcaatgatgtaataatttttaacttccaggaaataatctgtgaatggaaagattttttaacactctgagaatggggctagcctctggctgggcacacctgaaggtgtctgaacatagtgaatactaaagaaaaacgcttaaaactt

SEQ ID NO: 382 - DNA, 400 bp, Homo sapiens
agctcatctactgaattttgacctgctccgccgcgacgtgttgtactacaagggccggctggacatggacggcctggaggtggtggacctgaaggacgggaaggacagagacctccatgtgagcatcaggaacgccttccggctgcaccgtggcgccacaggggacagccacctgctgtgcaccaggaagcccgagcagaagcagcgctggatcaaggcctttgccagggagagggagcaggtgcagctggaccaggagacaggcttctcatcactgaactgcagaggaagcaggccatgctgaatgccagcaagcactgatggccggccctgctacctgacgcgccagaagcacccagccctgcccagcaaccggacccagcatcaggactggtgctgg

SEQ ID NO: 383 - DNA, 337 bp, Homo sapiens
ggcctgaaagggcggggccttaaacattatccaatcagggatgctgggctgggaacgtccaatcaggcaggcagctggaggggacaggtcggcttccgggatgtggtcggtcctttgtctctcgctgcagccggaggtcaaggtctcgtccttactgctgtgtgtcctctgctcctagagtcccagcctctgtggccctatgacctgcagggatcattgacatttagggatgtggccatagaattctctctggaggagtggcaatgcctggacactgcacagcagaatttatatagaaatgtgatgttagagaactacagaaacctggtcttcctgg

SEQ ID NO: 384 - DNA, 556 bp, Homo sapiens
cctattgaggccgtcggaccggcccggattcccggtcgaccccgcgtccgcccacgcgtccgcccacgcgtccgcccacgcgtccggtgaggggaggcagaaatggaggaacgggcgttcgtcaaccccttcccggactacgaggccgccgccggggcgctgctcgcctccggagcggccgaagagacaggctgtgttcgtcccccggcgaccacggatgagcccggcctcccttttcatcaggacgggaagatcattcataatttcataagacggatccagaccaaaattaaagatcttctgcagcaaatggaagaagggctgaagacggctgatccccatgactgctctgcttatactggctggacaggcatagcccttttgtacctgcagttgtaccgggtcacatgtgaccaaacctacctggctccgatcccttgattaccgaaaaaaaaccacttcggaaattgaatggccgcagggtcaccttcctctgtggggatgctggccccctggctgttggagctgtgatttatcacaaactcagaagtgactg

SEQ ID NO: 385 - DNA, 423 bp, Homo sapiens
acgcgtccgagaagatgttcctatgtcaactgaggaacagtataggatccgtcaggtgaacatttactattatctagaagatgacagcatgtctgtcatagagcctgttgtagaaaattctggaatccttcaaggcaagttaataaaacgccagcggctagccaagaatgaccggggtgaccattaccattggaaagacctaaatcgaggaataaacatcacaatttatggcaaaactttccgcgttggtgactgtgaccaattcacacaggtatttttagaaagccaaggaattgagttaaatccaccagagaagatggctcttgatccttacactgaactccgaaaacagcctcttcgtaagtatgtcaccccatcagactttgatcaactcaagcaatttctcacctttgacgaacaggg

SEQ ID NO: 386 - DNA, 790 bp, Homo sapiens
ctgaagacctgctacagttctctgccaatattcctgctctttacaatagtaaacagcttgaagactttttcaagggtggaataattaatgatagttctgaattaattggtcctgctgaagctcactcagattccctcattgatacctttcctgagtgtagtacggaaggcttctccagtgacagtgatctggtatctcttactgttgatgtggattctcttgctgagttagatgatggaatggcttccaatcaaaattctcccattagaacttttggtctcaatctttcttcggattcttcagcactaggggctgttgcttctgacagtgaacagagcaaaacagaagaagaacgggaaagtcgtagcctctttcctggcagtttaaagccgaagcttggcaagagagattatttggagaaagcaggagaattaataaagctggctttaaaaaaggaagaagaagacgactatgaagctgcttctgatttttataggaagggagttgatttactcctagaaggtgttcaaggagagtcaagccctacccgtcgagaagctgtgaagagaagaacagccgagtacctcatgcgggcagaaagtatctctagtctttatgggaaacctcagcttgatgatgtatcttatgtgtgtctccaacttctgatggcactcctactcatctgactcggccccccccactcgtgccggctccctgagccccaatcgctagacacccgctcctgttcttcctgcaactcacccgtctgctctgtgcgtccgccgtctcg

SEQ ID NO: 387 - DNA, 462 bp, Homo sapiens
ctgtccgtctggcctgccccgcggttccaaccacagtggtgaagcagcgcttgcagatgtacaactcgcagcaccggtcagcaatcagctgcatccggacggtgtggaggaccgaggggttgggggccttctaccggagctacaccacgcagctgaccatgaacatccccttccagtccatccacttcatttttttttgcagggtgctgcctatgggccctctgctccccaatgccttagagagaggaggggagccacggccgctcaccggaaggctgtgtgcggggacatccgaggtggtggtggacaggaaggacttgggaaggggagcgagaaattgctttttctcttcctccttgggcagaatgtagcttttctgcttcactgtggcagcctcctccctggatccttagatcccagaggagggaagaaaatttgcagtgactgaaaacagtaaaaaaa

SEQ ID NO: 388 - DNA, 1827 bp, Homo sapiens
cccggctcgagcggcgcggcagagtgcggcgcaccgcagctcctgaggttttggttatgaacaggattcggattcacgtcttgccaaccaatcgggggaggatcactccagtgcccaggtctcaggaacctctgtcttgtgcattcactcatcgtccatgctctcaccctcgtctggaggggcaggagttttgcattaagcatatccttgaagacaagaatgcacccttcaagcagtgtagttatatatcgacgaaggaatggaaaaagatgtcccaatgctgccccaaagccagagaagaaagatggggtgtccttctgtgctgaacatgtccgtaggaatgccctggcacttcatgctcaaatgaagaagaccaacccagggcctgtgggtgaaacactcctgtgccagctgagctcatatgctaagacagagctgggggtctcagactccagaaagtagtcgcagtgaagccagccgaattctatttgaagacagctggagtgatggggagcaggaacccattactgtggatcagacatggagaggtgaccctgacagtgaagctgatagcatagacagtgatcaagaagatcccctaaaacatgctggtgtctatacatttttaagaagtggccctgattatgcgtgaaaagctaattcgtttgcaggcgttgtatattgatcagtttaaacgacttcagcatctgctcaaggagaagaagcgccgatacttacataatcgcaaagtggaacatgaagctctaggcagtagtctcctgactggcccagagggacttttggccaaagaacgagagaacttaaagcgattaaaatgtctgcgacgataccgccagcgctatggaggggaagccttactgcataggcagttgaaggaacggagaatgctggccacagatggtgctggccaacaggcccataccactcgttccagtcagaggtgcttggcctttgtggatgatgttcgttgttccaatcagtctcttccaatgaccagacactgccttacccatatttgtcaggatacgaatcaggttctcttcaagtgctgccagggatctgaagaggtaccctgcaacaaacctgttcctgtaagcctctctgaggatccctgctgcccactgcatttccagttgcctcctcagatgtataagcccgagcaggtactgtctgtgccagacgatctggaagccggccccatggatctgtacttgagtgctgctgagcttcagcccactgagagtttaccttctgaggtcaaggatgacttggatgttgtgggtgatggtatgcagtgtcctccttcacctttgctttttgatccttcactaacccttgaagatcatttagtcaaagaaattgctgaagacccagtggatattttgggccagatgcagatggctggagatgggtgcagatcccagggatctcgaaattctgagaaagcctctgcaccattgtctcagagtggattggctactgcaaatgggaagccagaacccacttctattagttgatagtttggggaaccattttactttggtggatttaaatttctcgttcttcaaagaagtatttctgatcatctctcacaaaacacaggcaacccagactaccttgtttttcttctggattgagtattatagtcaaacgtaaagccaaattttgaggacgtggacccgtgggtttcttcccactcagggcaaggaagagaaagagagataatccctatcaaagcttctgggattattttgggactatacctaaaaggaaagtgacatctttgtaatgggatttcccaagtca

SEQ ID NO: 389 - DNA, 1746 bp, Homo sapiens
ggagcccggcgagggcgccggtgctttgttctgtctgaggccaggaagtttgaccgcgctgccatgccgaaccgtaaggccagccggaatgcttactatttcttcgtgcaggagaagatccccgtaactacggcgacgaggcctgcctgtggctcgcgttgctgatgccatcccttactgctccgcagactgggcgcttctgagggaggaagaaaaggagaaatacgcagaaatggcttcgagaatggagggccgctcagggaaaggaccctgggccctcagagaagcagaaacctgttttcacaccactgaggaggccaggcatgcttgtaccaaagcagaatgtttcacctccagatatgtcagctttgtctttaaaaggtgatcaagctctccttggaggcattttttattttttgaacatttttagccatggcgagctacctcctcattgtgaacagcgcttcctcccttgtgaaattggctgtgttaagtattctctccaagaaggtattatggcagatttccacagttttataaatcctggtgaaattccacgaggattttgatttcattgtcaggctgcaagtgattctagtcacaagattcctatttcaaattttgaacgtgggcataaccaagcaactgtgttacaaaacctttatagatttattcatcccaacccagggaactggccacctatctactgcaagtctgatgatagaaccagagtcgactggtgtttgaagcatatggcaaaggcatcagaaatcaggcaagatctacaacttctcactgtagaggaccttgtagtggggatctaccaacaaaaatttctcaaggagccctctaagacttggattcgaagcctcctagatgtggccatgtgggattattctagcaacacaaggtgcaagtggcatgaagaaaatgatattctcttctgtgctttagctgtttgcaagaagattgcgtactgcatcagtaattctctggccactctctttggaatccagctcacagaggctcatgtaccactacaagattatgaggccagcaatagtgtgacacccaaaatggttgtattggatgcagggcgttaccagaagctaagggttgggagttcaggattctctcatttcaactcttctaatgaggaacaaagatcaaacacacccattggtgactacccatctagggcaaaaatttctggccaaaacagcagcgttcggggaagaggaattaccccgcccttactagagagcatttccaattcttccagcaatatccacaaattctccaactgtgacacttcactctcaccttacatgtcccaaaaagatggatacaaatctttctcttccttatcttaatgatggtactcttttcaatttctgaaaacagtaaccaggcccaacttccctccttactacagtcatattaaacagatcacatcaatgacaaaatgtcactactataaaaactacttaatttgtaaggaaattgtttcatagatttaaaaaaattgtggttggagagcatcttggcatttgtgctttttttcttgagggattgttctgcttcctggctgtatgatgggtatatcattaaagtttggagtcctatatgaacaaaactgacatttttagagttgtacttttgggaatgttatagattgatcattctttctcctgataataaaggtattgaatatctgttatgaaaggttaaaaaaaaaaaaaaaaa

SEQ ID NO: 390 - DNA, 1560 bp, Homo sapiens
atgatctccatcgtctgggtcctgtccttcaccatctcctgcccactcctcttcggactcaataacgcaggttattggggtacaggtagcatttggttacataagctgcctgccgacactacggccactgtcgaggacatgctgccttctgtcaccaccgtcaccactaactctgacactatcaccgaaacctttgccactgctcagaacagccccaccagtgagaccaccaccctgacctccagtattgccccgccggccacggccacgcctgactcaaactctgtaccggctggccaggccaccccttccaaggggcccagcgcctctgccccctccccggccccagcttcagcccccaaggtcgcccccctcgttgacctgagcgacaccccgacctcaacccctgccgctagcaatttgtcttctagtgtcctggctaaccaaggggctgtcctcagcccaagcgcccctgctggtgtcggggaggcctctaaggctcctccggccagcaagcccacccctgcaccagtccccaccccgactggggcagccagtcctctagcagcagcggctgcccctgccacagaagcccctcaggccaagcaggaggctcccagcaccaaaggcccggacccggagcccacccagcccggagccgcgaagagcccggccgaggcagccacagcccttgctagcccgaagagcgaggctgcctccgtcagcaccacaaacccttcccagggcgaggacggggatcctctagagtcgaactgcgggtttatgcaacctaaccccctcatttctgatctaattaatgttgctatcttgtctttttatgccaagaaggcctctgacagcagggtaatttcagatattaaaaagaaaaatccaaatactataatcagttctttagctcaaattcgaagtgttactttagagccacacagagctgctggtgttctgagccggaccctttcttcctctctgaaaattgttgaggaggccttgcgagcaggagtggtaaagaaaatgatgaaattcctgaagtggcagagaaatgtggagggctctgagttcctgcccccctttgctctcttccacgcaagttcagctgaccgtcagcatcttctgaccaagctcaacttcaggtctactgccagacatgtggccacgggacacagagagatcatagcctcctatggacctgtttatgaaattccccttcacacgcacatggggtggctcatattaagactttgtctatacgacaccaaacatctggatgaaaatggaaaaaagaaaaagttgagcgttatgatgaagctgctcagctcggaggatgaggttctggtgggcaacgctgccctctgccttggtaactgcatggaggtgcccaacgttgcgtcttccctgctaaagacggaccttttgcaggtcttgttaaagcttgcaggcagtgacacacagaagacggccgtgcaggtgaacgcaggcattgctctggggaagctgtgcacagctgagcccaggtatgctgtggacacggagccaggctga

SEQ ID NO: 391 - DNA, 1840 bp, Homo sapiens
  misc_feature (1)...(1840): n = a,t,c or g
agattgcacaggaggaggcggtagcggaacctttctcctccgcctggttctcgcttccacccgggcccagttggggacggacgcactagaggcgacctaaacatggagacagcgggcgctgcaactgggcagccggcctctgggctggtaggctccggggtccacgaatgaccggcttttcctggttaaaggtggaattttccttggtaccgttgctgcagcgggaatgctagctggatttattacaacattatcattggctaaaaagaaaagccctgaatggttcaataagggaagtatggccacggctgcattaccggaaagcgggtccttcccttgccttgcgagcctctgggctggggctccctgtaatgcatggtgtggggttggttgtgaataacttcgcagtctggaaagctttaggaagttcacagtaatgaaccgactttccgaagtaaaaatgcaatcaatatttccaaccaattcccaaagaactcccgaatccggctgttgagtgggaggaaacattgaaatccaaatgagatgagcatgggatgaatttcaaaatgcttggttacagaaaaggggtggctctggagacacccaatgacagccaaaaggactgggactgatttctcccaggaacatggggcagattgctgactgaaccagtgcactggatagcattcagcctcatcacaggagaagtatgggtgtgcgtgctgggggagggtaaagttttcccacagttaagaagactatttaaaaatagtaattacaggaataacttccttatgtggaggggaccccataggaaatgattctgtttgtaacagttgaagcaaatttcatactaaaaaagtttataataaaagtatgataagaaaatatttataaaacagaccccctaatagcaatagtactgcactccgtctaattaaaggcctttcaagagcctttcttgtcaatatatcacacaacttggaagtcttattctgattagccagactacaaagtgacagtcacctggtaagtcctgtatggtaggaagtgggtgtggctctcgcggtcctccatgtggtctgtgctttacagccatcacacacatgctagttatttacctgatgcccttgcttgaaggccctataaattcttattacttaaaacaaaaagccagtaatggagttgtgatcaccccaaaagggcacagttggggctaaaataatggatgatatcagggggtaaacatattttttttgaggaagttgggtctgggatctctggaacactggacaatttggtccattttggtcttcagttggtncaaagtaaaaaaaggcccagttgtcacccgtcttcaaatatttttaacccagaaagtcaccctgagtacggagtccccaatataaagtatttggggaccaccctccccaacaaagctgttagggtaaattctgtgtgcacgccccaactccctcctgtcttcccacagtctcctacaaaaaaaaacagatggagaataatgtctacatgcaattgtttttactgcaattgtattttaaaatattttcaagagagagaaatactttaatatgtcaatatgtccagagaaaaaacctgtagttaaatatcagttgtgcaatttcttcctacttgcctaggctctaattagtcagcaatcaggtttaataaaggacatttgaaatttctgttatcatgaaaccttttattctaagggagatttttaaatgaaatgacaagaacttaatgtaatacttttctctagaccatgttaccctgttaaaattgctgtattgttaatgaaacaggtgtaatcagc

SEQ ID NO: 392 - DNA, 1827 bp, Homo sapiens
gaattcgggattcgggtgaatgtagtgattgtgggaaaaccttcagctgtagctctgccctcattctgcatcggaggatccacacgggggagaaaccctatgaatgtaatgagtgtgggaagaccttcagctggagctccaccctcacccaccatcagagaatccacactggtgagaaaccctacgcctgcaatgaatgtgggaaggccttcagcaggagctcaacccttattcaccatcagagaatccacactggagaaaaaccctatgaatgtaatgaatgtgggaaagccttcagccagactcacacctctatcagcaccagagaatcccacactggagagaagccctacgaatgtatggaatgtggaggaaagtttacctacaagttcaggccttattcagcatcaaagaatccacaccggggagaacccctatgaatgtagtgagtgtgggaaagccttcaggtacagctcggctcttgttcgccatcagagaattcacactggagagaagcctttgaatgggatcggcatgagcaaaagctccctcagagttacgaccgagttaaatatcagagagtccacgtgaaagagccacacacccattttcctcactttccctgagtctcaagagctcttgccttaccctataaatctcaacagcttaggatgtgtccctttcaactcagacttttcattttagagaatggggcagatggggcaaatccgttgaattttcccagaaatcacaccagccattagaaagcgtcaaggcaagtgggatgggcgtgctggggaatagaaagcagctctgggaccagttaccccatttaggaaaggagtttgcactaaactgtttttctcacagcagaggaacctttcccaaggtggggatggaagcacagttcggggacagaattccgatggattcccttagtttggagtccgcgttagtcaggcacagacagcagtgggaaaggacgctctgggtcctgttatttgctagggagggtaaagggaagactatttcaaaagctactgttccctagtccaagctttaaagttcgggtaaaaaaacaatgctgtttttgtttcatgatttcggttaaattaatggaaatttgggcaattgaggggattattttattgaggggtagaagagattcccagaatcatcatctgtgaatgaatggtgtccctttaagggctcttgggagcaggcccagacccatgtttccaagaagaaaccctggtgatattgccaagcaagacccccctgcccatccccccccagttgtcccggggctgaatgggcaaatctgtcccaaacagcttagtaaccggctgtgaagggagagggtcagaagcacttaggcgttgcccttctgattgctgtcctctcttgtcctcttcccactccaatgatgaaaatgattttctctaaatgcctgggtaaggatgctttcaagggagctcacttggcctgcttgccctgccctctcacctctgacacccagccccaggagccagaccactcctgcctccacctctgactcttcagcagctgaagattaatgcagagaaagagcaaagcccaaaagggagaaaaaaaaaaaacaaaaaaacaaaaaaacgaagcccagagaaggcaggctgtgcctgaggcctggtagcagagctcgttgctgggtgaggatggcactccccgagttttcccaaccgacgggatgaccttccattgtgttttcccaaccctgctcatcctgtagcataaatgaagtgcactattaaacagaatagtttttcagaaaaaaaaaaaaaaaaa

SEQ ID NO: 393 - DNA, 410 bp, Homo sapiens
aagaagggtgttgtgttacccactctatcgccatttcaagctggtgatgagggcctacagggacactatagatatattgcaactgggtaaaagtgcagctttaaagtgtctcctggatattcacaaaatttttcaggacaatgacccagcgtacatactgaatgatctctacatctcatactactgtgtgtggattcataaagtcaaatccaaaaagttgtcagatcttgcagaagccttaaaggaagtctcccttacaaaggcccagttggggttagaactgtaagaactagaagcagcagcactgcttgtccaggaggaagaaactgcattaaaagcagcccattcagtttctgggcagcagacactttgctccagctctgaggcaagtgattcagaggactcatacg

SEQ ID NO: 394 - DNA, 2775 bp, Homo sapiens
gagatgaggaaaatagggggtcttatacagaggggcttcatgaaaatggggtgtgctgcagtgatcctctttctctcttggagtctcgaatggaggtggatgactatagtcagtatgaggaagaaagtacagatgattcctcctcttctgagggcgatgaagaggaggatgactatgatgatgactttgaagacgattttattcctcttcctccagctaagcgcttgaggttaatagttggaaaagactctatagatattgacatttcttcaaggagaagagaagatcagtctttaaggcttaatgcctaagctcttggtcttaacttgacctgggataactactttaaagaaataaaaaattccagtcaattattcctcaactgaaagtttagtggcagcacttctatttgtcccttcacttatcagcatactattgtagaaagtgtacagcatactgactcaattcttaagtctgatttgtgcaaatttttatcgtactttttaaaatagcccctccctaccgtgcaattcccgagttagagggtaaagccccctgttgtaaaataaaggcctcaagcaaaattgtaccagtgatagcaacctttccccacacaggaccgttgaaaacagtaatgtggcctacacagtttttttaactgtcagagccatcagctgggctctttaatataatgactaaacaataattttaaaacaattcatagtagcagcatattaagggtttcttagtatgcctcatatcaccagcaatgatctttggctttttgatttatttgctagatgtttcccccttggagttttgtcaagtttcacccctgtttgctggcccccaggtgtactgttgtggcccttggttaatatcgcaaaccattggttgggagtcagattggtttcttaaaaaaaaaaaaaaaaacgacatacgtgacagctcacttttcagttcattatatgtaccgagggtagcagtgtgtgggatgaggttcgatacagcgtatttattgcttgtcatgtaaattaaaaaccttgtatttaactctattcaatccttttagataaaattgttctatgcaagaatgattggtgcttattttttcaaaaattatgctgtgaacaacgtgatgacaacaagcaacatttatctaatgaacatacagctatcttaatttggttcttcaagttttctgttgcacttgtaaaatgctacaaggaatattaaaaaaatctattcactttaacttataatagtttatgaaataaaaacatgagtcacagcttttgttctgtggtaacctataaaaaaagtttgtcctttgagattcaatgtaaagaactgaaaacaatgtatatgttgtaaatatttgtgtgttgtgagaaatttttgtcataagaaattaaaagaacttaccaggaaggtttttaagtttagaaatattccatgccaataaaataggaaattataaatatatagttttaagcactgcatcagtgggagttcttggcttatgttagtttatgttagtttattatgaaaacatcgaagatttttttgactatattatcagttaaacaaaaaggagtcagatttaatttgttttttgaagcactttgagaaattaattttaattaacttaatgagcaaatttttattactactttatgttcaataccaggttcttttcatttctctggattattttgcaaatcattggacagagaatttgggaatataaatctgtaacaggtgtttgacaccagtaggtctctttatttctgggaaatgtgtacctgtactttctgatatacagtgttcctaagtaaaaatcaattcaggggatttgtatagtgtctataggtaaagtagcccatgtcttgaaatatgaaaaggaatctgaaggtcatgaaaagtccagtggagaaaatctcaatgcttactgttactactaattgattcctactagtttccaggtttggggggatattgtttcaatgacgctccttaagactgttgattgcccataggttccaaataggaaattaagactcatggaacatttttaggaaagtaggattgttttctcctggttctctaaggaactacttctgcagtcttacatagtctcatccttgtttgttgtggtgcagtcgaactcctcaggcgtttggaaagcatgtggtagaccttcttccacacccacccatacccccgttcactgcgtctggaggtcttcaacagtgaagtagggcagcccacacagcctctcaggagcacctgtccgaggcacccggagcactttgcagagcacgtccagccctcatggggtccctgcatagaaatgtgaacccctgccactgaggaagatgaaggtagaccctgtgtctggaggtgctggagggcagcgggtcacctccttgtattcccaccttagtttgggggtgttttgaagaggttcagagactaaatcttaaaccttatttgaataccaacgatagctattttgggaatttcgatcttaaaaagtgacaaaacacatttcccattttcatttttcagctgaattttagtaacttatttttgatgttttaattttatcatggcctcctctttggagcaaacccttcccatgggtctcaaagcagtgacatttggtagtaaatcactgcctctcaggagtcggtatgcacaagcactcagcagccactgttgatgccttctagggaaacctaatttccgttggtaaaggtaggggcctcggaa

SEQ ID NO: 395 - DNA, 497 bp, Homo sapiens
gggacgcggagggtcagagtgcagacctgagaccactgctcaccgacttcagactccagtttatctgtgccccagcttcctcacttagtctcagaagacttaggctgaggcctcagaaggagatctccatcctttgtccagagcagaacaggatggccaatgtcccaggaatcattgaccttcaaggacgtgtttgtggacttcaccctggaggagtggcagcaactggactctgcccagaagaacctctacagggatgtcatgcttgagaactacagccacctggtgtccgtggggtatctagttgcgaagccagatgtgatcttcaggttgggaccaggtgaagagtcctggatggcagatggggggaccccggtacggacctgtgcaggtgaggacaggccagatgtatccatttttgcctcattgtattttgaagtgctgttattagaagtctggcaagttgatgagcagatagatcactacaaggaaagcca

SEQ ID NO: 396 - DNA, 719 bp, Homo sapiens
aaattggagcttgccttgccgatgttgatccaatgcaactagattcttcagtacgatttgatagtgttggtggcctgtctaatcatatagcagctctaaaagagatggtggtgtttccattactttatccagaagtctttgaaaaatttaaaattcaacccccaagaggttgtttgttttatgggccacctggaactggaaagactctggttgccagagcacttgccaatgagtgcagtcaaggggataaaagagtagcatttttcatgaggaaaggtgctgattgtctaagtaactcggtaggggaatctcaaagacagccacgattgctgtttgatcaggcctatcagaggcgccaacaatttatttcttttgacgaaattgatggtctggctccagtacggtcacgcaggcaagatcagattcacaggtaaaacttgcttgatggcacttcaacgtttcttcctattccctgagtggtattgatgtgtgagagatagaatgttaaatggtgaaagaaactttataagctagtagttcctttttttggtagtagaaccccagtatatagtacaaaaataaaaaatgtggatggttgcagtggctcatacctgtattcctggcactttgggaggccaaggcaggcagatcacttgaggtcaagagtttgagaccagcctggccaacatggtgaaatcctgtctctactaaaaaaaaaa

SEQ ID NO: 397 - DNA, 828 bp, Homo sapiens
gggtggttggttaccgccttttgcactagcagtagcaaggaaggggggtgggcgctctttctttttctcttagaagagggtttagcacaggttttttcgttctcacttccacaccaccttaccgcctcccgaccccccctctccccctccccacctatcgtcatgacgccctctccggattacttggtggtgctttttgggatcactgctgggcccaccggggccaagctaggctcggatgagaaggagttgatcctgctgttctggaaagtcgtggatctggccaacaagaaggtgggacagttgcacgaagtgctagttagaccggatcagttggaactgacggaggactgcaaagaagaaactaaaatagacgtcgaaagcctgtcctcggcgtcgcagctggaccaagccctccgacagtttaaccagtcagtgagcaatgaactgaatattggagtagggacttccttctgtctctgtactgatgggcagcttcatgtcaggcaaatcctgcatcctgaggcttccaagaagaatgtactattacctgaatgcttctattccttttttgatcttcgaaaagaattcaagaaatgttgccctggttcccctgatattgacaaactggacgttgccccaatgacagagtgtatcctttaaatccctactcaagaatcctttgaaaaaatagttccagaaaaaaatggtaattcaagaaactttcaaacattttaaattttgtcagcatatggataaaattggcctatccaaaatttgtttactctgctgagaaactaaaatacaactatacccatctttaaaaaa

SEQ ID NO: 398 - DNA, 588 bp, Homo sapiens
ctagtgaggcggaattcctcctgtcatgatctctggcaggaagaacaaaagaaggtaatccacaaagacacagcccttacttagaaattctgacaaagacagcaagacaaatctgctccccactcccacacaccacagacaaacacatctcagggcccctaaagaaggcatccccaccccaccctccgccccaagccatagaatcacagttcagtggaatattctccctggtactagatcaatccctccaccttccttcctacccctttttccttgacaatcccaacactgtccccctgcagcctccctggccctcccaaagcagcatccaccgccaggaagaggcagctgcacagttttagttccacctccagagacctatttcttttcctcagccctcctagtctttcggccgcctagtctctatggtgggccttttattttgtatagggaaagaaagagaaaagggagaggtgggagagatttcctagtgcaatacaaccaaaaaatatttttaaagtcttgaaaaataaacataaagcagccttcttcccccaggcaactaaacagaaagaggtttggttttgt

SEQ ID NO: 399 - DNA, 1944 bp, Homo sapiens
  misc_feature (1)...(1944): n = a,t,c or g
ctttcaaagccctttaaagttccgccttgggggaacccctgatttgaaccaaaccttttaaagctgggtttcnnnnnnnnnnnnngttatctggacagcttctttgagactatttaaaaactggtacaacaggtctctacaacgccaagatctaactaagctttaaaaggtcaagaagttttatggctgacaaaggactcgcgcaacgcagaaggcctttcccaccttaagcttccggggatctgggaattttacccccattctcttctgtttgtctgagtctcatctctctgcaagcaagggctgaaatcattttgtttggttgttttgagggagagaggcggggtgggggggtgcaaatctgccagcagctcttacgtaaggcatgttttattggggagggctgagcttttattttctcctctccagtggggttggcttttattgtttcttgtttgggtttggaatggaaatatggatagcagcataaagtacttttattttgacaaaattcatttttttcaacaatggagacatagatttgacccacaataacttctccccctctctttttactctgctcaaaaagcatctctcctcccattacccaaccttggtcataagtgtgcctggctggtttgcagatatttgttctgctttgtaaaaattggccattagtgcatttattgagatgatctctaaagagctatgccctgacctacccctgattctatgacattggggcccttcttttgctgaaactgccttacgtaatggttttactcctttgaaagagatttgacggaatgcattttatgccaagtgcttgcctgcactgtttctgcaatatgtggtgtatgctgtggtgatcttgctgggaatgattataagtgtgtgtgtggtgggggagtgggtattacatgcattgctgaagagtcatcctggtgttcctcattcctcccaccttcccgtggtcattttaattacggggcagtgtcacccgcaaagggaggaaactcaaagccgaaagcaaaattccaggcctgattctggcttttgaggttcctggttcttgaagccaggcctgacccgactctcagatggggtcagtcccgtcgctttgcagactgaccctggaaatctacaaaatgcagattttcctgatttcctcttctcttgcccagtttttttttttttttttttttttttaaagcctggattgtaaccagattttcttttttcccccttctcagctgtagatatgatatctcctttcagggccccagcttaagggcaaagtgagttaatgtgtagacaaaggcgagggcacaagagagagttacatcatctatagcatggtgaatgagccatggtgtgtggtttcctgggaaccaccaaacacttgcaggtttagctttttcccaggggttgacttacaagaaagaaaaccatgtttttgcaagattaaaatgtggttgaagtgtgcctaaattaaccatccccatttttatcatatttccaccatcactttcaggggttttaaggagtcagtgctcacctggggcggagctgggtaggtacatttttgcttcttaggaaaggctaagtcccggggttcccgtccggatttaagggttccagggaacttccccgaggaacacccgattcgcagagggtaaatttttctgggagttttgttttgcagggatagctggggagttatgggccaccctggttccacggatgcggtaaatgaatcccagcagaagtgggtgaagcagcgtttgcaagatgtacaactccgcagcaccggtcagcaatcaggctgcatccggacggtgttggaggaccgaggggttgggggccttctaccggagctacaccacgcagctgaacatgaacatccccttccagtccatccacttcatcacctatgagtcctgc

SEQ ID NO: 400 - DNA, 1958 bp, Homo sapiens
gaaattattccttagatttgatctagatgaagaaatggggccccctggcagcagcccaacaccagagcctccacaaaaagaagtgcagaaggaaggggctgcggacccaaagcaggtcggggagcccagcgggcagaagacccttgatggatcctcacggtctgcagagctcagtcccccagggcgaggatgattctgagtatttggagagagacgcccctgcaggagatgctgggaggtggctgcgtgtcagctttggtttgtttggcagcgtttgggtgaacgatttctccagagccaagaaagccaacaagaggggggactggagggacccttccccgaggttggtcctgcactttggtggtggtggcttcctggcattttataattgtcagttgtcttggagctcttccccagtggtcacacccacctgtgacatcctgtctgagaagttccatcgaggacaagccttagaagctctaggccaggctcagcctgtctgctatacactgctggaccagagatacttctcagggctagggaacatcattaagaatgaagccttgtacagagctgggatccatcccctttctctttgttcagttttgagtgcctcgcgtcgggaggtcctggtggatcacgtggtggagttcagtacagcctggctgcagggcaagttccaaggcagaccgcagcacacacaggtctaccagaaagaacagtgccctgctggccaccaggtcatgaaggaggcgtttgggcccgaagatgggttacagaggctcacctggtggtgcccgcagtgccagccccagttgtcagaggagccagagcagtgccagttctcctaaggagctggtggtgctcctcacggaaccttgccgcttggggaacctgacgtctaagtgtccagaaaggaggatgtgggcagggacggggtacagaggatagtgtgggtcagaggtgccagtagtataatattcatctccctggagttatgttgaaggcagagttttcatagggttagattttttttatccttttctagttcagttaattcatcctgttgaattgcaccatcgtgaaaagatgggaaaaatcgtgatgatgggtaaggggaaaacttcccggaaggcaatggggcaaggaaaaagaaagcctatgggaaatggctgtgctcccaacatagctttgcagatgatgtgggtttttttttttttttttggttgtttgttttgagagagagtcttgctctgtctccctgggctagggtgtggtggtgtgatcttggctcacggcagccttgccctcccgggctcaagcagtcttcatctcagcctccagagtagctggggacttacaggcatgtgatatgatgctcggctgatttttgtttacttctttagagagatggggtcttgccatatttgccaggctggtttgaactcctacaactcaagcattcctcccaccttggtctcccaaaatgttgggaccccgggtttgaagccaccgcgccccagctagccccctgtgttttgtttttgttttgtaaactttggttgatgttaaggccctccattttggaaagcaggaaaacaggattttttttttttttatcttgttcccctggaggaacccagggatggaggatagagtggcctgagagcagtgcttggattcagacctcctgctgggtccttctgctgggatacaggcccccaacaggcgggggtggagcagggagctgcgcctttccgggggtgcccggtggtgtgtagagaaaagctgcttgttttactccttaagtcaatgtattggtgactgttgatttgttggaacaatttcagggaatcaaggggctgtgcgagaaacttccctcatgttgtttgggcaacaggtgaatgaacctagagcggtgacatggaaaataaagctcactgttactcaaaaaaaaa

SEQ ID NO: 401 - DNA, 810 bp, Homo sapiens
cctgtctccaaactattataaagagacatccctgttggccgaggttccgaaaacagttcagttctctgagggaaggcagtgccagcagctacatgcttagcttggctctctcctgtatagttcttagtattagaggatggctttggcttatcagaaaggagttcagggaggggtttccagagaacaagctccatggaaggacggctcatagactcaatcattttctttgtaaaaacttcatcaaattccctcttcaaacctgttttcatggtatcagaaaggacaagactggggagatggttaacatttctgtcagcttcaacttcttcatcttcatcaattatcctgtcctcaatctcctgaagcttccttcgggcaacttcacactgtggttactccagttgtctgatccatttcttcacaaataacatctaatatcccaggtatggaaaggccactaacactgggatttactccatgcccctctacatcctgatgtgcacaaagaatccagtcattaggaccagcacagagctctgcttcagttatccttttctttcttactggacaatcatcatcctcctcctcctctcgcttgtgtttctttttacagtgaacagaaacacgtccgcgcgccgcactcccagcgggactgctagggactgcgcgaggtcccggccgcggggccaactcggcgccgtcagcccccggcgggaaggcccggccggggaaggccggctgcggcggctgcaggaagtccgagccgccgctcagagggaggccgctgaagggccggccgagcgcagccat

SEQ ID NO: 402 - DNA, 1169 bp, Homo sapiens
cacatatcttaaaagcaccacacgtcaactggggataacagtaggtcaacaggtaggtaggtttaatctagataagttgaaagatagattgctatcaaaaacagttctccaagatgtgcatagccaaactgggatagaaggcaaactcccccaaagctacctgctggttttgaaaaggggtggttaagaacatggctattccccaggagtagtagaaaataatatgccctgactaccaacagcctcaagtatgccttatttgcacatcctagacttggtgtctgtaagactcagttaccacttctattttcctgtacctaggagttagcaaaaggaaactggggccttcccagccgagccactaaacctgtcttatttggaatggggattgtccagcaaagggagcaaacatgaattagatgttaagctattgagctgaagaaaagaaagcagttcacatttaggtgaaatagatgatgttatcaggaagccaggttcccaccagagtcggtgcttggtacctggtctctccagtctcaacagactcaggtccaggtctctcccccaggaagcaaccactcaataaaatagagaacatctgagaattacaaatgtctatgcttgattgctcctctaaatccagtgcataggttaaccctgcatgcccatttcttcctgggcttcttgatggcaatgtgttcttaaataactggtcttgtgttcatgctaaagacaaacttacatgaagtttttcagtttaagacattctagtgaatggctgctatgtgtttctgggcactcattcctaaccaagtctttagaggatttcagatgaccttaaagatgcaatatctttttctttctttctttccttctttttttctggggacaagagttggcgcccgttcgcccgggtgggggtgctgggagtgcagtggtgcgatctcagctcactgcagcctctgcttcccaggttcaagtgtttctcctgcctcagccttccgagtagctgggattacaggcatgtaccactatgcctggctaatttttatttctatatttttagtagagatggggtttcatcatgtttgccaggctggtctcgaactcctggcctcaagtgatccgcccacctcagcctcccaaagtgctgggattacaggcgcgag

SEQ ID NO: 403 - DNA, 917 bp, Homo sapiens
tttcgtcgcaggacctcactgcgccctctgcctttatctaggcagggctagaaatggtctacttgcagtccgtcttcctgcttcatccggtggccaggcagagggaacggcacgggcaagggcctggaagggaatccgagtggcccatgtcaaacgatgcccataactcagccccgtagcggacgggggcacgaggaatcaggtgtagagcctgagtctcagggtcctgatctctaaccccagcgagttctcggggatccctgggcagctttgccgctctgatggctctgcttccaggctgatcatctttggctttgagcctcaggattctatagaatcagaggagcgcgctcttttaaagacagggtaactgaggcttggaggagccttggactggccgagggaagagtgggaggggcgggctcaaaggccaggaacctcaagtcacttgagtctggcagcgtcaagggacaccccatgctgggtgtgccgtcttctctttgcatagaatcttgagctgatgatggttttgtgggttttttattaagagaaaaggcttactgaacgctttatatgcatcaattcatgagtccgtaccacagcctatgagatgttacactcatttcacagatggagaaactgagggcagaagaggtgagcttacctgcccaaggcatctagtgaccagaggggcagccagggtgtgatcctgcctcatctgacttcgtagttgggtacacatttaacttccgccttcctgtgtgtgttttccaagagcatcattaaaaagttttggccgggtgcggtggtcacgcgtgtaatcccagcactttgggaggccgacgtgagtagatcacctgaggtcaggatttcgagaccagcctggccaacatggcaaaactctgtctctactaaaa

SEQ ID NO: 404 - DNA, 1509 bp, Homo sapiens
agtgcggtggaattcgtgggaggcaaatagaatgatttcggatcacctgctggagtctgaaaaaaaccgtgattcatctggaagatattacagggccagcttgccatattccaggcacacgttatcaagtttgggcctattgtggcctctgacttctctttcttcagccttttgaccacttattaattagtccatttgctagaagagtggtcaagggaaaaacgagagatgaaatttagttaagtctatgtgagcaagtgagagaaggttaggtaaggggagaggatggaatgcttgcctccaatgaactttggagcttgtatgtgagtcagattgctcccctattgctattatctattactcttgagagctggctgtcctttgaaagaaagaagtaatgttctttgaaagaaagaaaaatctcttgctgtgtcaaacctcaaaatgttgctattggggttagaaggcctcctctttatgctttttaatgctctttcaaacgtgttcttttagaccagttttctaataagctttgtaaaatgtactatccaaattagaagcggatttggaaatgcaaactaacgtgcacttagatatccaagtgggtgagcttagccactcttacccatgctctttccctggttttccctgggagacctgtcccgagatgatttccatataccagcatagaaaatcagaatcaagagcaaactctgagactggcacaatccaagaagatttcctggctctggcttttagtaatatcgagactccaactggccactgtactggactgtaatttataaatccagtagctacgcagggtggaggctgggctgaggattaccataatgaaatgtactaaatcttcatttaggtatgcaattgtgaagtgaaggcatctgctttctttacagtatcagagtccaagaacaggatgttcaccataggatgaaaagcctcatgacaaagggcagaactaacactccaaatttaatgtgtttaaattggtgggggcaccagcagaaaatacttctagctcagctttactcttcttccacactaggctgggcccagcaatacaggagaggatgaagggaggagctccaggaggcgagggaagagccctagcagggcggccatcacaaccactcactgagagttgcccttgcttaaaaatgtattttattttagccagtgggtcccttccctttctccctttccctctctactgcctcaagaacagatttgaggcccaggtgcggtgcctcacatctgtaatcccaacactttgggaggctgagatgggtggattgcttgagcccaggaagttcaagaccagcactgggcaacacagcgagaccccatctcttaacaaataacagacttgaggaacccctctaccttccataattcccctcaaacaccgccaactccaaacaatcactcaaacatgctcaacaaataagtatacaagcagaaacaataaaccaatctagattttaaaat

SEQ ID NO: 405 - DNA, 6590 bp, Homo sapiens
ttttcgtctatgtttctgatctgctttcaggaagaattattcatttttatcttcccaatctgaatgttttattgaatttttattttccaagttaataaaacctttggttattatcctgtctttgttttacagtgtcctgctcttgatgcgtggatgcagattttgtctctctgtggacgttaatgattgtggtctgaggggaagtcttttctgctccctgtgttgccctcattttctctgagttctctttattttggtggtctcagtctctatctttcacgttgtgaatttttctcaaatatatggtgatcctatggatctgttcatgttttaagagtgaggcatccaaaagctgattggaagttgtgtgtgccaactggtgagcttttccactagggtcaccaggtgggcacctggactcatcattggagaacactgcctgtcagtatttgcacgtgttttctctggggctcattctgtttcttgagagatattcccactactctccttcctgggaaacgggcatacacagggcttttagcctatgctgagtactcatgtggtttcaaaaatggtgtcccatctgggcagaagtccccatgagcacttggcttgactggcaaaggacaccttttgccccttcctccagacatacccagctctgagcttggacaatgctcgaggaacaatgaaaaggctagattttaactcctaattgccctctttagccaagtgcctctgtgcaatgcacaactgtaggaccatatccagagaccctggtctatactcagtgtgcccgagtcctgaccgctgagcaggcagcctcatcacccgtgagtatttagactttcattaagttgcttcaacctttgctgtgcctggtgtccctgagttggagctgctctgatttctccatggagtaggagcacagtggtcatctggctgcatgggaaggacaggggacctcagagccaataaatgccctggtcttcagccccatgtctcaccccatccctcctattccaatccccaagcctctcctggaggccacagggcatctctgctgaccactctgtggcctcccctctgcaggcatgtggttttaggatccccctccctgctcacttttccatcagttccattcctgcataaataggttgctagctcttgcttactgttctcttctgtattctgtgttcatggttgtattaatataactttcattcctctgctcctattttcatggggtttcatgagggaagaaacaggctcatgtgttcagtataccatcttgatccataaaccccatttgagttatctcacaggttgcttagggggcttgctgctctgactggtttgtgaacgtgccctgagtccagctgggactgcagcaacatccatcctgttgagctgtggtctgctaagtgattttgtgtaatgctgtgccaagtgcaggagagggatacatagcatggctaagctctgcttgaatgccatgattagttattaccttccttccttccccctggttttgctgcctattgtcagtaaatgatcttagatctcctgcctccccaaagatatagtctatgtggtggtctgggttctaggttttctttaccacccttgcttcacttaagaaacagaaaactggctaggcacagtagtggctcacacctataatcccagccctttgggaggccaaggcaggaggatcgcttgaggccaggaattcaagaccagcctgcacaacatagcaagactccatctctacaaaaagttaaatttaaattagtggtggcatgcacttatagtcccagctactcgggaggatgaggcaggagaattgtttgagcccatgactttgaggttactgtgagctgtgatcctgctattttactccacctgagtgacagagcgagacgctgtctcaaaaataaagaaacaagtagtccacacaggtgtttgccagcaaacaaacagcgcggattctctgttgaacgtggccaacattgcctcgtcgaagtttgtatcttgccatagttgatgatcaggtggtcggggcttcctggtcagacctgacctttgtggggagatgttctcccaccaaggctcagaagcaggacactcttgctgcccctcgggcagccacccagaacatgggcgtctccatttctgaggttcagcatagttccccccaccctcttcccatgcagtgcatgcctgctctttatcaggatggaacagagggaaggcagaggcactgggggcagcctgtgttgttgatctctgtaagtcacagactgttcgaaaacctcaggaattatgtaagcgttcagtgcctcatttaagagatgaaaaactgaagattagaaagaggaaacgactagtcgccctgctagttgatgacctccagatagccatcttcattcccagttaagtttactacaaaaccacagcctcagctgctgaagctaacctccctacccaccatcgctagggactcagaacaccatggagctcatctctccaacaaaagtcagaattagcaagtacagatgtgtcttacgaaaatgtcagaatccatcatggctgctttggtgaggagctgttctccttccgtggtcatgccattggaaggcagttgtatgacaagaatgctttcacatgagctccgattttcttaactctccagaaggacttcagaagcctctggagttttgagacgcggcctctctctcccttctgcttggagacaccttcctgggggtctccactgcattccccgccggtattcctctgtggagccttgcgccctcaggtcccagaaatgggctgtgtgggagcttccagtcagcctggtatctcgggaccttctcagccaggaaatgagactgcacaaagccctgtgaggcccagctgtgttatttctccttccccgacattgcataatcactgctgacacagcatttggggaagatttaacgtcttgggccagcagctgccatctggaaccatcaccacatagcaggttgttctgtcccatccaactgatgagggggctgccctaatgacaaggtccaggacctgggttgggtggtggaaggctgggagctggagtgggcattattgtgcttctgtgctgaaaattgctatggctcttttcccctaacagccagcgtgggagaaccaaacatgagacacaagcatccccttgagctccacagatcttgcgccttgctctcatcaggcatttccttggagaacagcagtcagcagctcatggaagtgagcccggtgcacagactttgcatggactttgcacaggttccatttccatcgtgtgcagacacctgtatctttgggctccacgtgagcacctgccctcttcactctgattttttttttaagagacagcatcttactctgtcaccgaggctggagtacagtggtgtgatcacagctcactgcagcctgaaactcctgggctcaggcaatcctcctgcctcagcctcccgagtggctggtagtacaggtgcatgccaccacgcccacctaatttttttatcttttatagatacaggtctcactgttgctcaggctggtctcgaactcctggcctcaggtgatcctcctgccttggcctaccaaaatgctgggattataggcatgaaccactgtgcctggccttcactctgatttttcttaagagtcctacaggaccttcaggtcttgtcacttctctaccattgtgtgtgaagacagggcatggggtgagcttggtcaggtgtgggtcaaaagcctggagactcagagctgctggttccccaagagcccacaaaagttatcagagtttctgagctgagtgttctgcagttgccagaccccacaatgctgggaatactggcttctttgtgtttagaacttgttctgagaaccttgatgagaacacatcaagcaagcagttcctcccagccagggctggagcaacatgccaaaaaacattcttgtctatgggaaaaagacaaccagtattttgtactgtttgaccaagttgtttttaaatatacacatgcctcaacaatccacggcctcaatcgcactgctaatttgtttaaatccctgacactcagatgtcaagaatagcttcatctagcagtgttctctttaaaggaacccttttttttgttttcattttaatcactgccttcttctctgggaggtattgtgggctagagaaagaagtcaggtttgggagtcagccagatttagattggagtcccagctctgtcaccagatctctgggtgatcttggcaaactaacttctgagcttctgtgcattataggcattcagcacatatttgttggatgaaaaatacttttcttgaaagtttatgaagttgtaggatgcccagcagcccccttttctctatttccttcctcttgaagcaagcgttgactatacctctttccctaacccttagtgtaccatagcttcttccaacctctctccaatccattacttttttctgagctaccctgtctcaaatctaactcaggcctttttgcaagaggaagtttaagccattgtttactcattaactcacttgacccttagaacaatcgtgggaggtgtttatttcggaaaggaagctaaagcacaggacagaaaaataaggtcatagcgtgaactagtaagtagcagaactgggaacataggactgttattttcaaacactctaaacttcactgcagttgcaaatttgcaaccaaaatggccgccttgaaagggtcttttgcagtaaaatctcagtgtccaacatcaaagacagttcttcagggcctccaattaactatacatcctgcccccagctgctcatctctgcacctctaacacgtacttcacagagtaggaaattgggctttctccttcaaaaagaaaagtagagaaggcctgagggcagtgtaattaaaatggagaagtagagaccacgaattacttggatgaattcataactggttggtctctgaggcagggattattatttttcctgtattttaagcttaaaagtagtgatttttgcattgttacaaaaaacaaaatagcaaaatatcatttgatacttgtattctgtttgcaatagctaccacttcctttagccccagcaaaaatcaataggtgtgtattctctacaagcccatgctgtgccacgaatgccaatattgctaaatgtcatgcaaggatttatacacttttttaaaggaaactctggaagtgcctgttgtctggagagttgacattgtccaaagcaggccaacactggtatgggtatggagaacccacgtcctacctgtgggtcacctgcagatgccgtgaaattaactctctgggttggaagtgagaagactttttttaaaagtcctttctaagtttagaaatccaaaggttacgaaggtagtttttatttatcttcaataagtggcctatttgcttaaagcaagtgtacctctgtatatcaagcccaaagcttaggggcagtgcttcttggctttagtatctgagaaaggtgcctttgggaagagtttgggtcagacagaaggtagtctgaatcttaaaggtttcagatgaatgtttgaagtagaacctgggaaatctgcttcctagggctgttagaaggaaattggtctccttaaattacgtcagcatctgaggcagtttcctaagggaatttcttttaaattcaaaagttcaactgcaggaataaatagctgtacaggactagatcttcccatccctcatcttttccccttccccgagtaacgactcaaaaaggcttctgaaattctactcataatcggagccgtttgcattccaacaaggatcccttaagccaaatgcctggtgtgtttgtgtagaatgtcccctggggtagggggcggtagctgtggggagggaatgtggtgcaggggacacctgcccctctgcccttgaaattgcaccataagatgctgcctatgtcactcacagtggtgctgatactatccgccaaagacaaattgtgaacacggaaaaatggtcgttccctactgtacatcctcaggacagacttaactaaacttggagacaggagattgttcagaccatattgtagtgggtggtgatcattgttttattttgggggagtctggtctattgagcagattgaatgtttccttattgtgcagggcttaattgactatgtctgaaagtttttactgagagctctaagaaaactattgaggaaaatgaaatgttattttgtagtacaaggattatttttgtctatttaggatatacatagctgtagctttgtaaaaaaaaaagatccttttataaccaatatatgaatgtgccgtcttacttattgattactgtaaattaagatataaatggctatttgcataatttatacctgtgggaattaactggagtatttgttatttgactgttttctattaaggaatattaggcttggtgctatgatgaatgatcttgtaaaatcatgtgtattcttaacaccatttttgaatataaatttcttgaactgac

SEQ ID NO: 406 - DNA, 364 bp, Homo sapiens
gcgtcgacctatcagatttaaatgaaaaaagagaaggaagaggctgattgctggagtgttaaagaaatcttggccgggcgtggtggtcacgcttgtaatcccagcactttgggaggccgaggcgggtggatcacgaggtcaggagatcgagaccatcctggctaacacggtgaaaccccgtctctactaaaaatacaaaaaaaaattagccgggcgtgatggcgggcgcctgtagtcccagctactcgggaggctgaggcaagagaatggcgtgaacccgggaggcggagcttgcagtgagccgagattgcgccactgcactcccgcctgggccacagagacgaactccgtctcaaaaaaaaaa

SEQ ID NO: 407 - DNA, 370 bp, Homo sapiens
ggcagggctggccaccaccaaagccagacaggcagagcacacaggcctgtggtgcctgcactcagacactacaaaggccttggtcactttacatgttagtaaagccatggccttggagaggggaccctgggaggctgggccccaggctcttgccaccacctcggaaagactgcccaaggtggttctcacagaaggcaggagctcctggtccaccttggtctcctggaggcatcatccctgcaatccctgctcagaccccataaagatcttaggagactgccctcccagaggccagcagactgtgttacagggcacctgggagcactggtcagggtccgataacgccttgaatgtgtaagcctcagtaggc

SEQ ID NO: 408 - DNA, 700 bp, Homo sapiens
gagaagtgactgacggcctgcaccaacttagacggtcacagtcatgaaaagtgcacgggtgggattgcccgagttggccatgaattaccgtgatggatccatttggaaatgaagttggttgtgacatttcttcaagttttgtttcgcttgaagcttgactggtagatggagaattttggccttatgtatcttatgtgacttgcattacccagtccagtcctctgccattaatctaaggtccgcaatgtatcaggtattttactgagaatcttgcttacctaattctcacaaaaaaaaaaaaaccttgggagatgagggtggaaacaggatgagaggtcaggtgacttgtctgagggctgacggtttgtaattggaagagtcagggcctaaccactggtctctttgacacaaaaactcatgctcttagtggcaagcacagtgttctcaagattgggggaagccagggagggacagtgggttgtctgctactagtgggtcaaaattacatatttagtcatgaatggttcagcttttaccatttaaataacaaataaatgttctttctccataggcattaaagactattccaactggcccaccatcccgcaagtgtacctcaatggcgagtttgtagggggctgtgacattcttctgcagatgcaccagaatggggacttggtggaagaactgaaaaagctgg

SEQ ID NO: 409 - DNA, 592 bp, Homo sapiens
gcactctccctcaggcacaaaagctgactgatgatcagggccccgtcctgatgtccactgtagccatgcctgtgtttagtaagcagaacgaaaccagatcgaagggcattcttctgggagtggttggcacagatgtcccagtgaaagaacttctgaagaccatccccaaatacaagttagggattcacggttatgcctttgcaatcacaaataatggatatatcctgacgcatccggaactcaggctgctgtacgaagaaggaaaaaagcgaaggaaacctaacctatagtagcgttgacctctcctgaggtggagtgggaagacccgagatgaccgtgttgagaaatgctatggtgaatcgaaaagaccggggaagttttccatggaggtgaagaagacagtggacaaagggaaacgggttttggtgatgacaaatgactactattatacagacatccaagggtactcctttcagtttagggtgtggcgcttttccagaggtcatgggaaatatttcttcccgagggaatgtaacccatccgaagaaggcctgcatgacttagaacatcccgatgtgtcctttggcagatg

SEQ ID NO: 410 - DNA, 483 bp, Homo sapiens
  misc_feature (1)...(483): n = a,t,c or g
gtacgggagatatgattgacgcctttaagctagnagtaacactacgattactgaaaagaatccggccctcgaggccaagaaggcggaacgaggtaacaagcttgcttagagatgcagcaaatattacggagatggatagtgaaaattctgcaaaagaaggtgatcctggaacaatattcttcttcagggaaggagctgctgtgtttcggaatgtgaaagacaaaactatgaagcatgtgatgaacgttctacaaaaacatgaaattcagccctatgaaatcgcactggtacactgggaaaatgaagaacttaactacatacaaatacagggacagtcaaaacttcacaggggggaaatcaagttaaattcatagctggatttacatgatgccattctagagaagtttgctttctccaatgctctatgcctttctgtaaaactggcaatttgggaagcatcactggataaatttattgaatcta

SEQ ID NO: 411 - DNA, 465 bp, Homo sapiens
cccacgcgtccggaaaaactgatcagtcaaatacagccagaggtggaccgagaaagagctgttgtggaagtgaatatccctgtagaatctgaagttaatctgaagctgcagaatataatgatgctacttcgtaaatgttgtaatcatccatatttgattgaatatcctatagaccctgttacacaagaatttaagatcgatgaagaattggtaacaaattctgggaagttcttgattttggatcgaatgctgccagaactaaaaaaaagaggtcacaaggtgctgcttttttcacaaatgacaagcatgttggacattttgatggattactgccatctcagagatttcaacttcagcaggcttgatgggtccatgtcttactcagagagagaaaaaaacatgcacagcttcaacacggatccagaggtgtttatcttcttagtgagtacacgagctggtggcctg

SEQ ID NO: 412 - DNA, 844 bp, Homo sapiens
tcacattaataaggtttctccccagtatgggttctctcgacgacataataagagctaagttttcacagaagttttgcttgcattcaaggcactggtatatatgaccatctatctgaataatctcatgcatatgaataaaaatctttttacccttccgagggcatacattatatattttccttttttgagttctctgattacgatttctcttctgaagtgtacattttctatggctctctcctagggagttttccgctggtcttcttgacccatcgttgccctcacagtcattttcttgataagaacttggaagatacatctgtatcaggcctatcaatcatgagcctctacaagtatccagcatcatatatgttaattccttacttggtatttccaaccctagaatccagatggaagaaaacatacattcctgatcctgacaatttgacttctcaaagaagatagcattcgtaacaagaaagactcaagaccatcttccccctcctcctcaaaaggtctctagttcagaactattcacaacactcaattcttgcctctccctggcagccgccgcgcctgccctctaggccttggggacagcacttccggttactctccggacactcgaatctgggcttcctggcggccgcagactctgcgatagtagatctaagggccaggcttcgggaaggaaagaaaagcgaacccggcacggacaagacctaggagcaactcccttcgtgcgcctagactagaggagttggggccaggccgcccacagagcgctttaacagagcgcttcaagggcccacaaggccggctacgcaaaccctttcaagctggc

SEQ ID NO: 413 - DNA, 1452 bp, Homo sapiens
cttgtatctgaacatgcctttgaaattccagacaatgttagacctggacaccttattaaagaactttctaaagtaattcgagcaatagaggaggaaaacggcaaaccagttaaatctcagggaattcctattgtgtgtccagtttcacgatcctcaaatgaagcaacttccccataccattcccgaagaaagatgaggaaacttcgagatcataatgtccgaactccttctaacctagacatcctagagctccacacaagggaggacatcttgagctctaaactgaatggaaaattcaacaaacatctccaaccatcctccacagtacctgaatggagagcgaaagataatgatctacgattactgctgacaaatggaagaataattaaagatgaaaggcagccctttgcagatcaaagtctttatacagcagatagtgaaaatgaagaggataaaagaaggacaaaaaaggcaaaaatgaagatagaagagagttcaggagtagagggagtggaacatgaagaatctcaaaaaccactgaatgggttttttacacgtgtgaaatcagaactcaggagtagatcatcaggatattctgatatttctgagtcagaagactccggacccgagtgcactgcactgaaaagtatctttaccactgaagagtctgaaagttcaggtgatgaaaagaaacaagaaataacatccaactttaaggaggaatctaatgtgatgaggaacttccttcaaaagagccagaagccatctagaagtgaaattccaattaaaagggaatgtcctacctcgacgagcacagaggaagaagctattcagggcatgctgtctatggcagggttgcactattccacgtgtttacaaaggcaaatacaaagcacagactgcagtggtgaaagaaactctctccaggatcccagcagctgccatggcagtaaccatgaggttaggcagttgtatcgctatgataaaccagtggaatgtggataccatgtcaagactgaagatccagacttgaggacttcctcctggattaaacagtttgatacttccagatttcatcctcaggatctaagtagaagccagaaatgcatcagaaaggaaggttcatcagaaattagtcagagggtacaaagtaggaattatgtggacagcagcggctcaagccttcagaatggaaagtatatgcagaattcaaacctgacttcgggggcgtgccagataagtaatggcagtctaagcccagaaaggccagttggtgaaacttccttctcggtgccccttcaccccaccaagagaccggcatcaaatccaccacctatcagcaaccaggcaacaaaaggtaaacgtccaaaaaaaggaatggcaacagccaaacaacgtcttgggaagatccttaagttgaacagaaatggccatgcacgtttctttgtgtga

SEQ ID NO: 414 - DNA, 878 bp, Homo sapiens
  misc_feature (1)...(878): n = a,t,c or g
caaacnccagtcagggccctgtaaaaaaaaggcaccccatttcccttttatcaagcttttcggggtatgctgtcggccctccacaatgtggttcaaaaaccaggaaaaagtgtcttaactggaggccttaatgcgttgaatttcatcggcaaaaaaccacataatgtcctgccaaaaagtgaccgcgttttaaccgggacaaagcggccatgggagagacctgttcccttgtctcagatgttaaggggaagctaaggagaaggagaagcagagactggcaccagcagctcacgatggaggagaacccgcgcactaccgggatgctgtttgatgaatatcaaggcttgtcaccccctggaagccctggaaattctgtccaatgaaagcgaaagcaaggttcagtcatttttagcatcacttgatggagagaagctggaactcttaaaaaaatgacctaatttccattaaagacatctttgcagccaaagaattagagaatgaagaaaatcaagaagaacaaggcttagaagaaaagggagaagaatttgctcgcatgcttacagagcttctctttgaattacatgtggcggccacacctgacaaactcaataaggccatgaagagggctcatgactgggtggaagaggatcaaaccgtggtgtcagtagatgtggcaaaaagtgtccgaagaagaaacaaagaaggaagaaaaggaagagaaatctcaagaccctcaagaagacaaaaaggaggaaaagaaaactaagaccatagaggaagtatacatgtcgtccattgaaagtctggcggaggtaacagcgcgctgtattgagcagcttcataaagtagcagaattaattcttcatggacaagaagag

SEQ ID NO: 415 - DNA, 497 bp, Homo sapiens; identical to SEQ ID NO: 370
  misc_feature (1)...(497): n = a,t,c or g

SEQ ID NO: 416 - DNA, 819 bp, Homo sapiens
atgcgggatgaagacaagcctgaggacgagatggcccaaaagcgggccagcctgctggagcggcagcagcggcgagcagaggaggcgcggcggcgcaagcagtggcaggaggtggagaaggaacagcggagggaggaggccgcgaggctggcccaagaggaggccccgggcccagccccgcttgtgtccgcagtcccgatggcgactccagcccctgctgcccgggctccagccgaggaggaggtgggcccccggaagggggacttcacgcggcaggagtacgagcgccgggcccagctgaagctgatggacgacctcgataagcacgccgcgctgcgtggtatccagcgccttaccgactcggggcatcaagtcaataacgtcgaggttattgcccgtcgttgtgagcgttttgcgggtacggaaacagagcgtctggaagatctcaattcccttgccagactgactacccccaacaccatcgtgctggctgtacgcggcggttacggtgccagtcgtttactggcagatattgactggcaggcactggtggctcgccaacaacatgacccgttgctcatttgcggacatagcgattttaccgcaattcagtgcggtcttctggcgcatggcaatgtcatcacctttagcggccccatgctggtagcaaactttggcgcggatgaactgaacgcctttaccgagcaccatttctggctggcgttacgcaatgaaaccttcaccattgaatggcaaggggaaggcccgaaatttcggggccgaaggcacagttgtggggaggcaatcttgcgatgctga

SEQ ID NO: 417 - DNA, 1170 bp, Homo sapiens
tacaatagtaaaccaagtctttattctttgaagaatgtaccagagcatttagcaaaattgttttaaaatggagggaggtaaaaggcaaatgtaacttaaattcgggttatgctttcggagtatgaaccattgaggaaagaattatcaaaatcccaaatcaaatgcagtgtccctcttgtctcacttgtggctagcaaatacagcagcagccttgagaataaatacagatttgctgcctactagctaccagctggtcaagtttgaagatattgtgcattttcctcagaaaactactgaaaggatttttgcctttcttggaattcctttgtctcctgctagtttaaaccaaatattgtttgccacctctacaaaccttttttaccttccctatgaaggggaaatatcaccaactaatactaatgtttggaaacagaacttgcctagagatgaaattaaactaattgaaaacatctgctggactctgatggatcgcctaggatatccaaagtttatggactaaatgctgcaggtcagcagaaatttgcactaataatacttaccaacccactttgtggatatgaatcagaagagtttgtttattctttactgtgtgtgtgtgtgcgcacgcgagtatgtgttcaatgttgctcgcacagagagattgttctaaaaaatggcaccatatttggcctaacaggatttatttttatgtcatcacctcccttgcctttgtttctgaaaattttgtctgctaaaaagattctgctacagagaggtagatgaagttatatcatggggtcaggggagatgggaaaattttaagtttttgtctaactccccttcatctgtaactgtgctaatctatctagagacctcaaacactgctaaaggccttgcaattgctgctttacccacgcatctcttgctttcaagatggactacaaaagttccttatccttttgaaaaggtcttctgacacacttatcttgcacaaagaaaaagaaaatttcttttactgtgtttaatgttcagtgatatcactgaggaaatggtgaaagctcctatcagaactataggatttcttctgggaaatacagatggaaatacagaatgaatatgtttttttgaggtcggaaactgactttaaaagcctccttgaagttttttacg

SEQ ID NO: 418 - DNA, 356 bp, Homo sapiens
cggttcttgaagaaacatatgaatgtattcggggggacaagggcttccagtttttttcacaacaggtcagccaccatccgcctatctctgcgatgtcatgctgagtctataaatgttggttactggctagatgcgagatggacttactttactctgggcgcaaatccatgcaaattgttccaattggcacaaaccatgtgactctgccactttattggggatcatattgagtggaacaaactgacctcttgcatccatatcatcttaagcgtacagaagtggattgagcactatggagagattgccatcaagaacctgcttgatgattgctgctactgccatacgaattttataaa

SEQ ID NO: 419 - DNA, 535 bp, Homo sapiens
ataaatacgttattactttcaggggggaaaggtggaaaaaataagaaaaataaaaactcttctaaaccacagaaaaacaatggatccacttgggccaatgtccctctacctccccccccagtccagccccttcctggcacggagctggaacactatgcagtggaacaacaagaaaatggctatgacagtgatagctggtgcccaccattgccagtacaaacttacttacaccaaggtctggaagatgaactggaagaagatgatgatagggtcccaacacctcctgttcgaggcgtggcttctttctcctgctatctcctttggacagcagtccactggcaactcttactccattccccacgggaaggagatggcaacccatggctggcaggcttcacctgggatggagtttgacaaggaggcctattcagttttgattattaggcaaaacaaacatgggcacatttcaaaggcaataattcaaccttccacagccttccagtttccaccgttaggttattgttgttttgggagc

SEQ ID NO: 420 - DNA, 2692 bp, Homo sapiens
ctcgatttgtgccgtcagtctaacaacctgtgcttgcaaagggaagaggatcttcagagaacaagagattaccatgactgtatgaatgttgttgaagtgttcctagaaaaatttactacagaatgggataacttggccagatctgatgcagagagtacagctgtccacctggaagctttgaaaaagttagcattggcattgcaggagagaaagtatgctattgaagatctgaaagatcaaaagcagaaaatgatagagcatctgaatttagatgacaaggagttagtcaaagaacagacgagtcatttagagcaacgttggtttcagcttgaggacctcattaaaaggaaaatccaagtgtcagtcaccaacttggaggagttaaatgtggtgcagtccagatttcaggagctaatggagtgggcagaagagcaacaacccaacatcgccgaggcccttaagcagagccctcctccagatatggctcagaaccttctcatggatcacctggccatctgcagtgaactggaggccaagcagatgctcctgaaatcgcttataaaggacgcagacagggtcatggcagatcttggtctcaatgagcgacaggtcatccagaaggctctctctgatgcacaaagccacgtgaattgtctcagtgacttagtgggccagcgaagaaagtacttaaacaaagccttgtccgagaaaacccagtttctcatggcagtgttccaggccaccagccaaattcagcaacatgagcgaaagataatgttccgtgaacacatctgtctgttaccagatgatgtgagcaaacaagtcaaaacatgtaagagtgcacaagccagcctcaagacttaccaaaatgaagtcactggactttgggcccagggtcgcgaactaatgaaggaagtcacagagcaggaaaagagtgaagtgctggggaagcttcaggaattgcagagtgtctatgacagtgttttacaaaagtgcagtcaccggttacaagaactagagaagaatttggtttctaggaagcattttaaggaagattttgataaagcttgccactggctaaaacaagcagatattgttacatttcctgaaatcaacctaatgaatgagagtactgagcttcatacacaactggctaaataccaaaacattcttgaacaatctccagaatatgaaaatcttctacttacgctgcagagaactgggcagaccatattaccatcgctgaatgaagtcgatcattcctacctcagtgaaaagctaaatgctttgcctcgacaatttaatgtaattgttgccttggctaaagacaagttctataaagtccaggaagcaattcttgctcggaaggaatatgcttccttgattgagttgacaacccagtctctcagtgaacttgaagcccaattcttgaggatgagcaaagttcccaccgacctggccgttgaggaggctctttctctgcaagatggttgcagagccattctggacgaggtggcgggccttggggaggcggtggatgaactgaaccagaaaaaagaaggttttcgcagcacaggtcagccttggcagccagacaagatgctgcaccttgtcaccttatatcacaggctgaagcgacaaacagaacagagggttagcttattagaagacaccaccagtgcttaccaagaacacgagaagatgtgccaacagctggagagacaactgaagtctgtaaaagaggagcagtccaaagtgaatgaggaaacgctgcctgcagaggagaagctcaaaatgtatcactccctggcaggaagtctccaggactcagggattgtactgaaacgagtaaccatacatcttgaagatcttgccccacaccttgaccccttggcttatgagaaagccaggcatcagatccagtcctggcaaggggagttaaaactgttgacttctgccattggtgagacggtgacagaatgtgagagccgaatggtgcagagtatagacttccagactgagatgagtcgctccctggactggctgaggagagtgaaggcagagctcagtgggccggtgtacctagacctcaacctgcaggacatccaagaggaaatcagaaaaatccaaattcatcaggaagaggtccagtccagcttgagaatcatgaatgcgctgagtcacaaggaaaaggagaagttcacaaaggccaaggagctgatttctgcggatttagaacacagcctcgctgagctctcagagctggatggagacatccaggaagccttacgcaccagacaggctaccttgactgaaatatatagccagtgtcaaagggtattatcaggtatttcaagcagccaatgactggcttgaggatgcccaagaaatgttacagctggcaggcaatggcctagacgtggagagcgcagaggaaaatctcaaaagccacatggaatttttcagtacagaggatcagttccatagtaacctggaggagctccacagcctggtagccaccctggacccactcatcaagccaaccggcaaagaagacctagaacagaaagtggcttctctggaactcaggagccagaggatgagccgggactctggtgcccaagtggatctcttgcagagatgcacagctcaatggcacgattaccagaaagcaagggaagaggttattgat

SEQ ID NO: 421 - DNA, 1551 bp, Homo sapiens
ggtaaacatgttgcttggaagtatgcttttccagtttcacaaaatgacaccagtggccacagaagttagtaccctttggcctctgaaaatttcgctttatgaagagaaggctactaaaagacatgtaggacttagggttcaaggtggcagactagaggagctagtgtgtactgctctcgtggagaggaaatagtgacgagtaaacatggactctctaagtggatcatctaagaaaccacgtcaggattcaggatgcatcaagggagtaatgggacatggagaacagagaaaatcgaagctgggcagctgcctgcctgggaccagcatgaagacaggagaagctcctcaacacagggaaagaattagtgagtaagagtcctcaggggatccatacttcccacagtgacctgtgcaatcctgagaatgtgaaaaaccccatgactcccttgggcctctagactgatacagagagctacccagagtttttgcagaggcaacactcaagtccgtggggacccccccaggccctggactctggaacagcctggttgaggtgccatggccctgacagaagctgcagtcatggtgctggagatggacagattgctctactccctcttgacagaaaacctgctaaacccctgtggtttaggagagctttgtgttcccccaggaagcacttcgatggtgaattgggtgactccactcatcctgctcctaactgggcaggattcaacttcaccctgctcctaacttgggcagagccccaagcagggggtggggaggacgccctccctctcagaatactgaaaaggctggataacgcagatgaacaagcagcccagatcagaagggaacttgatggccggctgcaattggcagataaaatggcaaagaaatatgtgaatgttatattggaggagaagaaaagcaggtggcctgagactctgggactgatctgtgaagtggtgccagatgttccttccaatcccatgaatgaactggtgcaagaaagaaaattccccaaatttatagcaaaagatatggagaatatgtatatagaagagttgcggtcttcagtgaatttgctaatggccaatttggaaagtcttccagtttcgaaaggtggtccggaatttaaattacaaaaattaaaacgttcacagagactctgcggttttggacataggagatgagaatgagattcagctgtcaaagtccgacgtggtactgtcattcaccttagagattgtcataatggaagtgcaaggcctgaagtcagttgctcccaatcgaattgtttactgtacaatggaagtggaaggagaaaaacttcagacagaccatgccgaagcctcaaggccacaatgggggactcaaggagatttcaccaccacccatcctcgggctgtgtgtcaaagtgaaactcttcacagaaagcactggagttctggccctggaagataaagaactggtaagggtgatattatacccaacttctaatagctccaaatcagctgaattacaccgaatggtagttccaaaaaatac

SEQ ID NO: 422 - DNA, 392 bp, Homo sapiens
agctgagcggcggggggcagtgtcgcctcggtctagggacggcggcggagtcggtggtccctgcgcgatggccacctcggtgttgtgctgcctgcggtgctgcagagacggcgggactggccacatccctctgatggagatgccggccgtgcatttgctcactcagctgatgggttctgatgtttgcattgtgcctagctgcctacctttatgcgggatctgagtctggttattgctttgtgcgatccctcgctgtctgatcttttttaccttctggtggggtgttgggtaatgtttcttttgagggtctcttggatccctggtcgtcttgtttagcttttatggctgttggcccttttgtctctctgggggatctgtcatttcctctaccg

SEQ ID NO: 423 - DNA, 665 bp, Homo sapiens
aggggaaagcatgcagtgattagaggagtcactctcataaactcggccagttgtaggcttgtcactctctgtggatgctaactgagactcagaagagtcccttctcagttccatcaacaagcagggcattgaagaaataactgtagaatccgctacaccatctttctgaacttgagattccagttctacagatccatcttcctccttggctgtctcttgttcagatgcttttggtggggcttcggactcaatgagttcttcaacttttcccactgcctcctccatcttcatttcagaatttcaagttaaatcatggagtagagtctaggaaatgatatcaaagatgcaacaggaaagcaacctgcgctccgcggcgactccgtgccttctcgctcgcttcgcgcgcgccccgtcggggcacgcaccgaacccccggccgggactcttccccgctccggtgactcaggacgcgacggccaccgccgccttctcctcctcggaacaagccccggcagcgagcagtgggtcgcggtcagagcccctgccgggaccaaagtgaacctcgccgcctccgcagcctctaccaccaagtcccttcagtcgtccgcgccgcccccaagaaaatgtcaccagaggccgttccgctgggcgcctcacttccgccc

SEQ ID NO: 424 - DNA, 1269 bp, Homo sapiens
ccgagacgcactgggggccggatgtagaatcctgcttatctgtgaaatgcagttaacacatcagctggacctatttcccgaatgcagggtaacccttctgttatttaaagatgtaaaaaatgcgggagacttgagaagaaaggccatggaaggcaccatcgatggatcactgataaatcctacagtgtttcactcttgttgcccaggctggagtgcaatggcgcgatcttggctcacggcaacctctgcctcccgggttcaagcagttgtcctgcctcagcctcctgagttgctgggattacagattgttgatccattttcagatacttgtggcacgcaaacaaagcagttcaccctctacaaacttgggaaaaatggaagacaatgaactctatctactgaaatttattttcaaccctttcccccaaataaccaatatttcacgaggctttgaaaaaattttggtatctcagcaaattgacactttcaattcctaattgtttacattgaagagggagaaaaacaaaataaatcaagaatacctaatatctcaagtagaaggtcatcaggtttctctgaaaaatcctcctcgaaataatgaataagaccgaaagtcgacaaagatatataaactctcttcacaagaagaaagtattgggacattattggatgctatcatttgtagaatgtcaacaaaagatgttttatgaaatgtccagaaatattaacaaaaattctcagcattaaagaaaacaattgattttcctttccgtgcctatacaactaaaagtcaccaatagaaaagtttaaatcacagaatggtattaaaaaaaaaaaaaaaaggccaggcgcggtggctcacacctgtaatcccagcaccccgggaggccaaggcaggcagatcacctgaggtcgggagttcgagaccagcctgaccaacatggagaaaccctgtctctactaaaaatacaaaattagccaggcatggtggcgtatgcctgaaatcccagctactcaggaggctgaggcaggcgaatctcttgaacccgggaggcggaggttgcagtgagccaagatcacaccattgcactccagcctgggcaacaagagtgaaattccatctcaaaaagaaaccaaaaaaacaaaaaaaaaacatgccgtttgagtactgtgtttttggtgttgtccaaggaaaattaaaaacctgtagcatgaataatgtttgtttttcatttcgaatcttgtgaatgtattaaatatatcgctctt

SEQ ID NO: 425 - DNA, 1263 bp, Homo sapiens
ggctttttaaatgacccaggcgtgggtaaagcatcggtccaggcatcggtggcggggacaggcctaggcagcccgggccacccagactggcccctaatgagctcccaagtggcctgtggggacttggcctcagttttgccagctgtgaactgggaccgtcgctgctaaggccatggacaccttcagcaccaagagcctggctctgcaggcgcagaagaagctcctgagtaagatggcgtccaaggcagtggtggccgtgctggtggatgacaccagcagtgaggtgctggatgagctgtaccgcgccaccagggagttcacgcgcagccgcaaggaggcccagaagatgctcaagaacctggtcaaggtggccctgaagctgggactgctgctgcgtggggaccagctgggcggtgaggagctggcgctgctgcggcgcttccgccaccgggcgcgctgcctggccatgacggccgtcagcttccaccaggtggacttcaccttcgaccggcgcgtgctggccgccgggctgctcgagtgccgcgacctgctgcaccaggccgtgggtcccctctctgatctccaagtcccacggccgcatcaaccatcgtgttcggccacctagccgactgcgacttcctggctgcgctctacggccccgccgagccctaccgctcccacctgcgcaggatctgcgagggcctgggccggatgctggacgagggcagcctctgaaccccggcgccgcccaaccgcgcccctcgcgccttttggggctctcctgctgggcgcgggtggggtttgtgggtttttttccacctcttttctcccaatcggactccggccaaactcccctagacagatgggtgacctgtctcctttgagaggatgctgaggcatctgtagcagctgtttcaaacaccaatgtcacctctcctcctggcccccgcccaatggggagaggaattcggggccctactctggggaccacctttcacccgtttgtactttctgggccacgccgacccctgggtcgcttgatgtaaaagccaaaagctgctgcctcccacttggatcatgtcgcctgggattttcatccctcgcacaaggactaggggttcacacggtgaactgggggaagggaagtgttagggggcaagtcgcggcacccccccttccataaactcacgtcctaacccccaggacctcagaagatgatctgatttggaaataggatcattacagatggaattagttcaaaaa

SEQ ID NO: 426 - DNA, 1542 bp, Homo sapiens
ctaggctggtaagggccgggaaggcgcgaacctgttcgcaggaaaagcaggcgagtgtgcttgggcaatgctcagtaccttgaggcctggcttgaccactgctgcagctcggcgagccaagaacgccctgtcgcccacgacacgtgcgtaggcgcaagctggaaagtgcaagtcctgtggcttccagaggcagggaggcatggtgccggttatctttaggtcctcgagcgtcagttccttgagcgggagtacgctagcacacgcagggcgcctaccagtagctgagcaggacctgtgcggctcccactgtgagccgccgcacgcggagagccttgaccgttcagcatactgccgcgggtcggcgtccgcatcgacgcgctttagaaacgctctaggttgagaccgccggcatggatctccacctctactgcagacacaactggaaggcttcggaccagtcgggctgaggttcggagaagttgcagaccagcggaaatcttcatcgtccagctcacaaggttctggcgtggtcgcaggacgtgcaccagcggcagcagcagcagcaacaagcaggacgcgcgctttgtcaacgtccatgggttggtttctttctggggcttttccatcagttctcttcctctttctctttgctggcaatctcagctcgtaccttttctttttcctccttcgtgcagctgggtcttcatcctcatgtactcccttggcatctatggtgacgtgacttagaaggtggtgcagaggtaggtgcagccctggggtcatgagaagtttcctgaagtcttcattggtgagttttgatctggaattggcgacttcgatattaacaaggatgcggcggccgcagcaagtcgaggagtcggggcaaagctgggcccttgaagagctgttgctggagagcatacacacgatcctggagctgggcctcttcctgatgccttccagggcttgcagccctgactgctgcaggaagacctgaacagccattacgctcaccacgttgatactggcaacagcagtgaggttgttgaggagccaaaggccctcagggagcagctgggctgtttctggaaaaagaactgcagaaggataaataaggctgccaaacacgctcatctctgagctgcatttgccctcccacagtctccactgctcctcagttagcaggttgcttagacatcgaagcacggggcatgccagcggagaaggtttgctgtgtttcagggtgctgcaagcctcgacgaaggctgaccgagccccctctctctccttttcctctgtcccccgctgggcttgccgcagaactgctgcacctgcctcccgctcccgccggcggcgccgtagctcctcaccccgcagaccgtgggcctgaggcggccctgccgtcggctccacatggggagcaggaggaggaaagccgaaggaaacagcagccacaacgcggcggtcagagtttaggttatctctcttattccctgaacaattgctgttatcctgttctttttcaaggtgcccggatttcat

SEQ ID NO: 427 - DNA, 367 bp, Homo sapiens
tctggctcttcctggagaccgggcagctccccaaagacaggagcacagatcagagaagctaggagagctccagcaggggcacagaggattgggggcaggaggagtctggaacacagccttcatgccccctgaccccaggccgaccctccccacaccctagggtaccccagtcgtatcctctgtccgcatgtgtggccaggcctgacaaacacctgcagatggctgctgccccaacctgggacacggggtcgaaggggcctgtacactctgtcatttcctttctagcccctgcatctccaacaagtccaaggtgacagctggtgctaggggcgtggggttaataaatggcttatccttctctccaaaa

SEQ ID NO: 428 - DNA, 489 bp, Homo sapiens
ggcacgagcacatactcacagagaacccaccatggtgctgtctcctgccgacaagaccaacgtcaaggccgcctggggtaaggtcggcgcgcacgctggcgagtatggcgcggaggccctggagaggatgctcctgtccttccccaccacgccgacctacttcccgcacttcgacctgaaccacggctctgcccatgttaagggccacggcaagaacgtggacgacgcgctgaccaacgccgtgacgcacgtgtactacatgcccaactcgctgtacgccctcagcgacctgcacccgcacaatcttcggatggaccctgtcaacttcatgctcctaagccactgtctgctgtagaccctggtcgtccatcttcccgccgagctcactcctgctgtgcacgcctccctgaacaatgtcctcgaatctgagaggactgagctgacctctagcacctcatgactaggctcttcggagtcaagcctctgccg

SEQ ID NO: 429 - DNA, 489 bp, Homo sapiens; identical to SEQ ID NO: 428

SEQ ID NO: 430 - DNA, 2231 bp, Homo sapiens
  misc_feature (1)...(2231): n = a,t,c or g
tttttttttttttttttttgtgtttaagagtttattaggataggcacataacagaaagctccaaaggacaacaaagctgcaccttcctaaaggctgaccctcaaagcaccattttgttagaactcagaggagaagctcgatctctgagccttccctcctcacagtttgggaaacatgcacaggatgaaggtaaatcctgcatagaaatcttgtaattccagaattagtcaaacaaaatttgaaatacacacatttaaaaatacttacattcntccattttagcgttccatgaagtgattacttgacatttacaattacatcttgacattcacagagcaacgcctttggcaggggatctaattccaagcttaagcccaaatctatgcaaaggaccttcagctccagaggaatagtggggcaaaaatctggctgaaaaggaactgcttgccaccttggcagataagagcaacagcacaataaaggggattcccagagctttctacctaaaaatagaagggcattatctacaagaacagacccaaaacacaatttatttttaaacaagccccttcagtgaagtcatttgtcctcaggaatcctagtatgaaaatagtgtctttgattagtgaatatatggagaattcggattatcatctctatttttagttgagaaaatgcacaaaccatatagatttaaaccatgggttttgcagccgaagtagagacagatgttttctgggatcatatctcagattcccaagctaaagctattgttcaaggtgatggaaatatgtagggggcattaaaccattttgcagctgctagaaagctgtgttttcctgttttcctgatttagacaatggagaagctaagaagagaaataataggaaaggctttcctatgttagttttaaaaagactgtgttatttttaaatccaattttttttgtccaaacctccatctcctgttctccctagttttccacagaaatatttaacaggaataaaggttgaaaacaaaagtacctaatgatcatctcccatccatcgaaagattgcctcagggataagacactcaaacaagggcttgtgatgaggatggaaaagacaaagcaacttgaagagaaaaaaaaaattcttttaaactcagttcatcctgcaaaatggacataacacatgcatataaaggtttgactttttaattccacttttttgcctgatcgcaggggaagatgggcatgtgggctgggcccttcctgaagccttgctccctccaccactgggcttaacagacaggcctccaggtggccttgcaaaggcccgaacagtggaccgccagccccacttcccccacacccttaaatccagagcctccatgcagttcatcccccacattaccccaaacataacgtccgtaagtgcctacacgtagatgtggttgcatcatgatgctatggcaatgcgtatgtcgcttaggtgtgtgggccaccgaaggcagagcccagatgtggttggtcttgcctggaagccaagctgttgagcaggggtgtagtccctctacagaggatgctcaccaagttctaatgcattgtcgataactgtccctgccctggtttttgtgcattcctcagattatctgtggtaagtgtcctcctgcatcctttctcaagtgacaaagaagaaagaaagagcagtgatggcacctgaaattcaggaatgagtaggcatggcgagctgggtgtgtgagatgttctctctttacattgtctgctttgagatgtgggatgaggggagggagagagttggtcctgaatatattcagttttttccaagagtctcccagaattattgacctatttggacaacaaatcttccattgtcttggtgtcccatctcccaaagtgaaaacttcccccgtccccatggcccctggcttgttctgctgctgaacaggtcaccctgggcagaaacactgtgtctagcgagaagttagcaggtggcagggtgcacctctccccatactgtgacccttggattccccactgtgccacgcccgagcaagctggggcccctcaggacaaggacgatttgttaatggcctcttggccggtgggcatttgtttacccactactgtagccccaagatcccccaaacaagaatttccatgcttcaaagtaacagcaaaaataaacaggagaataaagcacgtgtttgagcccagtggtttccat

SEQ ID NO: 431 - DNA, 1023 bp, Homo sapiens
  misc_feature (1)...(1023): n = a,t,c or g
agcccccccnattgaaaatcgagagtctatgccacgngcgggaattcgctatatttcatcttttatctttttctttgacatttaccaatcaccaagcatgcaccaaacactgctttaggcactggggacacaaaggggacagagccatcctcctttgacacctggtcttcagttctgtgcccaacgtatatagttttgacaatgaccaggttggactgtttaatgtctttcaacttaccacgtaatcctcttgtagggatcacatctttctttatgatattgtatttctctacctctaacagtaaaaattccattcaacccttaaagctcacttcaaattcttctttgagaagtttttcctttctccgcacccagaggtacatatttgaactctctttgtacttggagggcacttctttcgtggtagttcttttatttttattaatctctgtatccatagatagtcctccaacaaccaaaggttgggactctgtcttacatatctgggngccccctcatagtgcagtaataagtaagttgattatatccgagctatgtaaccttatattttttaatggttggatatcactgagttttttttttttaagaatttttttattgaggtaaacttcacataacataaaattaactattttaaagtgagaagttcagtgccacttagtattgttaacaatgttgcataaccaccacctttatttaaagttccaaaaaaaaatgttctcctctaaaaggaaacccccatcccattaagcagatactctccattccttccttcctccagcccccagcaaccaccaatctgctttctgtctatatggttttatctattcttgctattttatataaatcgaattgtatgagaccttttgtgtctggcttctttcacttagtacaagtttttgagatttatttacatagtagcatgtatcaacacttcatttttatggccaaataaaattgtattatgtgtttatagcacaatttaaaaaaaaaaaaaaaaaa

SEQ ID NO: 432 - DNA, 481 bp, Homo sapiens
  misc_feature (1)...(481): n = a,t,c or g
aaaaccataaaatgttccccagttttgcagcacgttaaatttcaaaaaattaaattgaaccagagtcccctggcaccgttgaaggaaaaataaatagaaatgtgttagtgccaagtagtaatctttggcattaggggattgatacaattttgacattaaatcagaattgaagtttaaaaaccaggcaatagtttacattaataatttttttttttttttttttttaagatggagtcttgctctgtcgcccaggctggagtgcagtggcgcgatctcggctcactgcaagctccgcctcgcgggttcacgccattctcctgcctcagcctcccgagtagctgggactacaggcgcccgctaccacgcccggctaattttttctatttttagtagagacggggtttcaccatgttagccaggatggtctcaatctcctgacctcgtgatctgcctgccgaattcctcgncacggcatacagat

SEQ ID NO: 433 - DNA, 589 bp, Homo sapiens
aatttgttccacgccaagcccgagcgccgggactcggccaacctgtgggtgctggtggactgcatctttcgcgacacctccgaggaccttggatttcagtgtgacgccgtgaacctggccttcgggcgccgctgtgaggaactggaggacgcgcggcacaagctgcagcaccacctgcacaagatgctgcgggaaatcacagatcaggaacacaacgtggtggcactgaaggaggccatcaaggacaaggaggaacctctgcacatagcccagacccggctgtagctgctctcacaccggcccaacatgcagttggccccgaatgcagcccagttcagccccagctcacaccccccaacacccccaagcttctacaagcggagcagtccctgcgcaacctcaaggacatccacatgagcctggagaaggacgtcaccgccatgaccaacagtgtcttcatcgaccgccagaagtgcatggcccatcgtacttgctaccccaccattctgcagctggctggctaccagtgagcagcggcacggtgcttccccccaatcccccaaataaacagtgcgttagcattcaaaaa

SEQ ID NO: 434 - DNA, 589 bp, Homo sapiens; identical to SEQ ID NO: 433

SEQ ID NO: 435 - DNA, 642 bp, Homo sapiens
  misc_feature (1)...(642): n = a,t,c or g
gccttcaagcgcgggacnancanaagtcatggaccgcaacccctcgccgccgccgccgggtcgcgacanggnggaggaggaggaggtggccggtggagactgcatagggagcacggtctacagcaaacactggctcttcggcgtcctcagcggactcatccagattgtnnccctgaaaacaccaaatctagctcagatgatgaggagcagctgacggagcttgatgaagaaatggagaatgaaatttgcagagtatgggatatgtcaatggatgaggacgtggctttatttctccaagaatttaatgctcctgatatattcatgggagtactggccaagtccaagtgtcctcgattaagagaaatctgtgtgggaattttaggtaatatggcctgtttccaggagatatgtgtgtccatcagcagtgataaaaatcttgggtgttattgcactgtttgtatgattcagacccacctactctgctggaaacaagcagaagtggccagtgtttgggttgaaaggatccaggaacatccagctatttatgatagcattgcctcattatgtcagttcacaatgttacttctgtnaagtgggagtgtgacagctcttattgatagaacnaagttgaatggcagaatg

SEQ ID NO: 436 - DNA, 134 bp, Homo sapiens
tcgagtaaaccatgggactaaagcttggctccaaagcattcaggctgaacgaaaaacatggactgctattgcataataccaacgtgcattggacgagaacgatgctatggaacctgcataggcgacacggtcgg

SEQ ID NO: 437 - DNA, 403 bp, Homo sapiens
gtgttatcactactatgggagtttgccctcgagccaagagttcggcacgagctgactctgtcactccttttccgtaagcggagagctgacatgccacgggtgttagtgtttcgtgcccttttgatggtcctcatctttctctttgtggcttcctattggcttttttacggagtccgcattttggactctcgggaccggaattaccacggcattgtgcaatatgcagtctcccttgtggatgccctcctcttcatccattacctggccatcgtcctgctggagctcaggcagctgcagcccatgttcacgctgcaagtggtccgctccaccgatggcgagtcccgcttctacagcctgtgacacctgagtatccagcgagcagcattggtggtcctagaaaatt

SEQ ID NO: 438 - DNA, 599 bp, Homo sapiens
tgattcggacgagccgcacaggggtcagcttgctggtgcccaatggagccattccccagggcaagttctacgagatgtatctactcatcaacaaggcagaaagtaccctcccgctttcagaagggacccagacagtattgagcccctcggtgacctgtggacccacaggcctcctgctgtgccgccccgtcatcctcaccatgccccactgtgccgaagtcagtgcccgtgactggatctttcagctcaagacccaggcccaccagggccactgggaggaggtggtgaccctggatgaggagaccctgaacacaccctgctactgccagctggagcccagggcctgtcacatcctgctggaccagctgggcacctacgtgttcacgggcgagtcctattcccgctcagcagtcaagcggctccagctggccgtcttcgcccccgccctctgcacctccctggagtacagcctccgggtctactgcctggaggacacgcctgtagcactgaaggaggtgctggagctggagcggactctgggcggatacttggtggaggagccgaaaccgctaatgttcaaggacagttaccacaacctt

SEQ ID NO: 439 - protein, 135 aa, Homo sapiens
  misc_feature (1)...(135): Xaa = any amino acid or nothing
MKSSSSSSSPSFQSKTTMGHPLVQTGLSSSXPMSLCSSLLSSCRSWNPFPICYMLPLGTGGHSVNGSCLGISFGNSSLSRAPSCSPTAASSSSSSSSSSSSSESTKTMTSSMFCIVRIRAHIFKAMNSFAIALTI

SEQ ID NO: 440 - protein, 136 aa, Homo sapiens
DHRGRSRTNAHQKMTRSAGIPMFFFQMGNIPPKAKTPLRCILENWDQFDPQMLRKKLLIFFCSTAWPQYPLQGGETWPPKRSINYNSILQLDLFCRKEGKWSEVPYVQTFFSLREHWQLYDKCDLCPTGSPQSLPP

SEQ ID NO: 441 - protein, 30 aa, Homo sapiens
STYLHTHIYVYICMCRYVYMYMYTHLHTQA

SEQ ID NO: 442 - protein, 134 aa, Homo sapiens
  misc_feature (1)...(134): Xaa = any amino acid or nothing
SHHCTSAWATQRDPVSRKKKKRDKLPRNPSLPHMEALANVNFPRKSFRPEDAGKRIWLSRGGFCVPAARPQTMDTGPSCSSPGLQNFSPQRKENRACACXQNAGPAPKNPMCVRLKSVGRPQGFQRKLKETGLC

SEQ ID NO: 443 - protein, 169 aa, Homo sapiens
  misc_feature (1)...(169): Xaa = any amino acid or nothing
NSARGHRLRESGPWCSSPADKTKAQRPPRLKLGATPGEYGGEPLERMFLSFPTPTKTYFPKLRTLSQGSAPNGSAPGVKGHGQERWPNALEPKAVAATWNEHAPNGAVRPXSDLARRHKLRVDPVQFSKVPKGHCLAWVDPGAVHLPRLEFQPLSVARLPLGQVSWVSC

SEQ ID NO: 444 - protein, 149 aa, Homo sapiens
SSAEEFAGAAGPRAAGCGLAPAADQKPDHRLSLGTHLVGTAAAELGWPLGLRGHGEHGGEVPEAYPPTSMSRSPPTVLVICGPGNNGGDGLVCARHLILFGYEPTIYYPRRPNKPLFTALVTQCQKMDIPFLGEMPAQPMTIDELYELV

SEQ ID NO: 445 - protein, 105 aa, Homo sapiens
  misc_feature (1)...(105): Xaa = any amino acid or nothing
FKQICLFLLLFFEMESCSVTRLECSGTISAHCNLHLPGSSDSPASASPVTGITGTCHHAQLIFLYFYYMTGFRHVAQVGVELLGXAIHLPWLPKVLGLQAPAPDL

SEQ ID NO: 446 - protein, 395 aa, Homo sapiens
  misc_feature (1)...(395): Xaa = any amino acid or nothing
ALCEPQPFQGSGCVIAILGRKMFSSVAHLARANPFNTPHLQLVHDGLGDLRSSSPGPTGKPRRPRNLAAAAVEEQYSCDYGSGRFFILCGLGGIISCGTTHTALVPLDLVKCRMKVDPQKYKGIFNGFSQVTLKEDGVRGLAKGLAPTFLGYSMQGLCKFGFYEVFKVLYRHMLGEENTYLWRTSLYLAAYARAEFFADIALAPMEAAKVRIQTQPGYANTLRGCSSPKCIKEEGLTSILTRGVLPLWMRQIPYTMNXSSPCLERTVEALYKFVVPXAPAVKCSKPEQLGCNHLVAGYIARVFCANCFSPRADSVVSGVEXRKKVASAFSGPSKRLGIXKVXWKGLFARIIMIGTLTALQWFIYDSVKVYFRLPRPPPPEMQESLKKKLGVNSSS

SEQ ID NO: 447 - protein, 96 aa, Homo sapiens
GTRWFCLLRPLFALSVHFLQRAGRMAHKQIYYSDKYFDEHYEYRHVMLPRELSKQVPKTHLMSEEEWRRLGVQQSLGWVHYMIHEPGKLCYVIVKQ

SEQ ID NO: 448 - protein, 302 aa, Homo sapiens
  misc_feature (1)...(302): Xaa = any amino acid or nothing
RRSLSAFCSRLAAPPLRSSRGSSRCGSALALALLALRPGPGPGPAPAMEKTELIQKAKLADARRSVYDDMATCMKAVTEQGAELSNEERNLLSVAYKNVVGGRKSRLGRVISSIEQKTDTSDKKLQLIKDYREKVESELRSICTTVLELLDKYLIANATNPESKVFYLKMKGXFTFRYLCLEVACCDDRKQTIDNSQGAYQGGILILRQERRLQPTHPIRLGGLLFNFSVFYYEILNNPEACLHAWLKTAFXWRAIAXLDTLNEDSYKDSTLIMQLLRDNPTTLWTSDSAGEECDAAEGAEN

SEQ ID NO: 449 - protein, 304 aa, Homo sapiens
METSVIEGGLNITLTIRLLMHGKEVGSIIGKKGESVKKMREESGAPINISEGNCPERIITFAGPANAVFKGFAMIIDKLEEDISSSMTSSTAASRPPVTLRLVVPASQCGSLIGKGGCKIKEIRESTGAQAITIAGIPQSIIECVKQICVVMLESPPKGVTIPYQLKPSSSPVIFAGGQAYTLQGQFAIPQPDLTMLHQLAMQQSHFPMTHGNTGFSAGLDTSAQTTSHELTIPNDLIGCIIGRQGAKINEIRQMSGAQIKIANPVEGSTDRQVTITGSAASISLAQYLINVRLSSETGGMGSS

SEQ ID NO: 450 - protein, 233 aa, Homo sapiens
  misc_feature (1)...(233): Xaa = any amino acid or nothing
RIPCARWAKLCKVSSFAPDWTPMFALCPSSPPGLAEATYLKSQENSCLPGALPGTRAQGVGAAPERGSHSPPCRMTVHNLYLFDRNGVCLHYSEWHREEASRGSPKEEEYKADVRGWLFSIRSFVSKMSPLDMKDGLPGPSKLSRYKLHYYGDAHWGSKFVMNYXLXALGPIPRLLLHQHLTSALVCGSLVVKESPLVPLGPKTVQSEALFGSRTWTPYVRSLPFLSPAQGWA

SEQ ID NO: 451 - protein, 63 aa, Homo sapiens
QVIQQGRQSKGVTQKDLATKINEKPQVIADYESGRAIPNNQVLGKIERAIDVGTRSARVLRAQ

SEQ ID NO: 452 - protein, 115 aa, Homo sapiens
  misc_feature (1)...(115): Xaa = any amino acid or nothing
VESNTGRKWTEAAGTGDIQCLAWGSSGDGRGGDPRGRVPAAALGAAVVAAMASPDPWAPGPKQPGRWADLAALLLCGLRPAXPPYSPASPHLAPKRSHRASDLLETRQGAEGRAR

SEQ ID NO: 453 - protein, 90 aa, Homo sapiens
  misc_feature (1)...(90): Xaa = any amino acid or nothing
FFASLLESPVSPRLAMDPNCSCAAGVSCTCAGSCKCKECKCTSCKKSECEAISMVWGCGXGCCSCCPAAASKCAQGCVCKGASEKCSCCD

SEQ ID NO: 454 - protein, 132 aa, Homo sapiens
  misc_feature (1)...(132): Xaa = any amino acid or nothing
NSIMEEIQELNEVARHRPRSTLVMGIQQENRQIRELQQENKELRTSLEEHQSGLEELIMSKYREQMLRLLMASKKDDPGIIMKLKEQHSYDXHWYIVTSPKDSSLMHLDTSLKHLNMDWREGTWKQIRMYTK

SEQ ID NO: 455 - protein, 143 aa, Homo sapiens
RAGAKCNPGSHGCFGAQDSKMAEQLSPGKAVDQVCTFLFKKPGRKGAAGRRKRPACDPEPGESGSSSDEGCTVVRPEKKRVTHNPMIQKTRDSGKQKAAYGDLSSEEEEENEPESLGVVYKSTRSAKPVGPEDMGATAEGQGG

SEQ ID NO: 456 - protein, 86 aa, Homo sapiens
  misc_feature (1)...(86): Xaa = any amino acid or nothing
MSEGPSVRSEEAICLYYEELGGGARQTHVRRPLSECSPGDWSHSGVAEGPXCIQFLHITSHGAKEALSTWLGLLTSGPATTAAVLP

SEQ ID NO: 457 - protein, 349 aa, Homo sapiens
  misc_feature (1)...(349): Xaa = any amino acid or nothing
ICSASSCRCRARHRVLARRSQNTRSLPPPSLSPASRSPRPTPAATLRDSLSGGLCSSTAGLIRGTASMDLQGRGVPSIDRLRVLLMLFHTMAQIMAEQEVENLSGLSTNPEKDIFVVRENGTTCLMAEFAAKFIVPYDVWASNYVDLITEQADIALTRGAEVKGRCGHSQSELQVFWVDRAYALKMLFVKESHNMSKGPEATLESXAKVQFVYDSSEKTHFQRRISCSGKPTANLHHLSALVTPAGKSYECQAQQTISLASSDPQKTVTMILSAVHIQPFDIISDFVFSEEHKCPVDEREQLEETLPLILGLILGLVIMVTLAIYHVHHKMTANQVQIPRDRSQYKHMG

SEQ ID NO: 458 - protein, 125 aa, Homo sapiens
KDQTILENKQQYDIEITRIKIELEEALVNVKSSQFKLETAEKENQILGITLRQRDAEVTRLKELTRLFKTVDLNVLQSLTQKPNTVHELRKSRTALNKEEVGDLSPGPSTHFNFSHLLGIWGSAA

SEQ ID NO: 459 - protein, 48 aa, Homo sapiens
  misc_feature (1)...(48): Xaa = any amino acid or nothing
GGRPEFLVSSQKISIWGLECQSQYFLXAHRRXVFGDWNVNLNTSFLGK

SEQ ID NO: 460 - protein, 529 aa, Homo sapiens [sequence omitted]

SEQ ID NO: 461 - protein, 97 aa, Homo sapiens
LVVMDALVEDDICILNHETAHKRDTVTPVSIYSGDESVASHFALVTAYEDIKKRLKDSEKENSLLKKRIRFLEEKVIFIFYLHCVCDIRNNSKYLKF

SEQ ID NO: 462 - protein, 222 aa, Homo sapiens
  misc_feature (1)...(222): Xaa = any amino acid or nothing
GTREQLRHTEHQLPPALKMFHQIWAALLYFYGIILNSIYQCPEHSQLTTLGVDGKEFPEVHLGQWYFIAGAAPTKEELATFXTLLDNIVFQNMGCWLLPPIAASNLSVLPIRMXVGKMGLLCAPGKWDLTHLTEGGGTDLQETXRGRPDMKTEALFPASCPRVGIMLKXEQAQGYQRFLLYNRSPHPPEKCVEEFKSLTSCLDSKAFLLTPRNQEACELSNN

SEQ ID NO: 463 - protein, 134 aa, Homo sapiens
SSMASALSYVSKFKSFVILFVTPLLLLPLVILMPAKILDSRQVCVQYMKDTNMLFLGGLIVAVAVERWNLHKRIALRTLLWVGAKPARLMLGFMGVTALLSMWISNTATTAMMVPIVEAILQQMEATSAATEAG

SEQ ID NO: 464 - protein, 83 aa, Homo sapiens
PEDAPLENVECDNMNRFDRPDRNVRQPQEGFWKRPPQRWSGQEHYHLSHPDHYHHHGKSDLSSLKYYSLPAAFPDPQTTPREN

SEQ ID NO: 465 - protein, 214 aa, Homo sapiens
  misc_feature (1)...(214): Xaa = any amino acid or nothing
VVRRSGFLFCLFVLFLSSMNSASVDGHLSGCRLFLFLSPLFRFYCDYCDTYLSPHDSPSVRQTHCSGKKHIENVKDYYQKWMEKQSQSLIDKTNGLHFQQGKNPPNPFSAPSFLPGAGXYQPSPPSLRGPPRPGMNAQAPPYWGGPSHGWPMIGPPPSSWGLIAQWGPASGELRPPMGGHYCQLIAWGPPMDVGPSCPFHXWCPLGPGMTRPDR

SEQ ID NO: 466 - protein, 114 aa, Homo sapiens
PTEYENLFPCIKEAFVVEEWVKETLAVLWPAKQYPFVTPIEERILMEEGKAFPPSRSTAKQKLDGNPVSPTPVIGLSPTPNKEEKHLNLCPFEPTGHLDGARDTAGPSWLHHRF

SEQ ID NO: 467 - protein, 114 aa, Homo sapiens [sequence omitted]

SEQ ID NO: 468 - protein, 22 aa, Homo sapiens
MRMWPACCLILPRTGCTCCSLV

SEQ ID NO: 469 - protein, 236 aa, Homo sapiens
  misc_feature (1)...(236): Xaa = any amino acid or nothing
ALSTLAGDMPRGRKSRRRRNARAAXENRNNRKIQASEASETSMAGSVVTSTPRRTTLSGPEEDPSTPEEGLLPPLKEASSTAQAQKPFSCRRSNFSGAPRKVFLMSILALIFIMGNSAKEALVWKVLGKLGMQPGRQHSIFGDPKKIVPEEFVRRGYLIYKPVPRSSPVEYEFFWGAPSTRGNSSKLKVHAFLWARVSXTDCSKDWPCNYDWDSDDDAEVEAILNSGARGYSAPLK

SEQ ID NO: 470 - protein, 137 aa, Homo sapiens
VGGAGGQSAAAAARRCSEGEWASGGVRSFSRAAAAMAPIKTHLPGFVEQAEALKAKGVQVVACLSVNDAFVTGEWGRAHKAEGKVRLLADPTGAFGKETDLLLDDSLVSIFGNRRLKRFSMVVQDGIVKALNVEPDG

SEQ ID NO: 471 - protein, 83 aa, Homo sapiens
AVASAMAAASGSVLQRCIVSPAGRHSASLIFLHGSGDSGQGLRMWIKQVLNQDLTFQHIKIIYPTAPPRYAVIYLTCQYNSVA

SEQ ID NO: 472 - protein, 74 aa, Homo sapiens
WPFFLPLKLFKFQVILFLDVIYILNFYLYRYFLASFYTKYDPTHFILNTASLLSVLIPKMPQLHGVRIFGINKY

SEQ ID NO: 473 - protein, 191 aa, Homo sapiens
  misc_feature (1)...(191): Xaa = any amino acid or nothing
ISWVCLNCQSQHLLKAPLSSSGHSGRIMVETHGKNETADYKRLQTFPLVMHSDMPQEMRAETMELCVTACEKFFQQQTESARQDCSKETMDKKFGSSWHVVIGEGFGFXEITHEVERTSSTLYFGGTLAVCVWKLLLDTLSPAPSPAGPFPATHLGWGAALGRSWFFQGELGSFLFVFVYQFPEPRPVCET

SEQ ID NO: 474 - protein, 79 aa, Homo sapiens
  misc_feature (1)...(79): Xaa = any amino acid or nothing
RKTQTTRRGPGLWAGPGGXRGGWWSRRLLLAAGFLGTHPGSTHPGLQQPRFKWDHTRSSQGAFIFTFFPRGGQEHSFTS

SEQ ID NO: 475 - protein, 69 aa, Homo sapiens [sequence omitted]

SEQ ID NO: 476 - protein, 101 aa, Homo sapiens
  misc_feature (1)...(101): Xaa = any amino acid or nothing
QKTSRTFLAALCTVCPRRHCLDPCFXRRELWGLPAPAPPPREPTVPPPLSPGPMGPGSGCVPCLRALCLLPQMRPVPERLPVQPGSVWPQTGIQNPKKKKK

SEQ ID NO: 477 - protein, 44 aa, Homo sapiens
SGVLAHGQAEAEVETSCLFITGMRMWPACCLILPRTGCTCCSLV

SEQ ID NO: 478 - protein, 140 aa, Homo sapiens
  misc_feature (1)...(140): Xaa = any amino acid or nothing
CLPLCSTAFVSKQEGSEVVKRPRRYLYQWLGXEKRQSWAKALPLRDGLWGSCSREWPLWVVVGVQAACPGGHPGAPCVGRGGMGILHGGXCHHVGCLRAPVPYPDPLEPRREVCELNPDCNELADHIGFQEAYRRFYGPV

SEQ ID NO: 479 - protein, 92 aa, Homo sapiens
  misc_feature (1)...(92): Xaa = any amino acid or nothing
XTSVVRPFAKLVRPPVQVYGIEGRYATALYSVLNPYVKRSIKVKSLNDITAKERFSPLTTNLINLLAENGRLSNTQGVVSAFSTMMSVHRGE

SEQ ID NO: 480 - protein, 169 aa, Homo sapiens
MSMLRLQKRLASSVLRCGKKKVWLDPNKTNEIANANSHQQIWKLIKDGLIIRKPVTVHSRARCQKNTLAHWKGRHIGIDKRYCESKKIDRHMYHSLYLKVQGNVFTNKPILMEHSHKLKADKAHKKLLADQAEARRPKTKEARKRSEERLQAKKEEIIKTLFKEEDTKK

SEQ ID NO: 481 - protein, 88 aa, Homo sapiens
  misc_feature (1)...(88): Xaa = any amino acid or nothing
NFLKDGVLLCLPGWIEYSGMILAHCNLRLLGSNNSPSASXIAGATGACHHAWLIFXNFSXRWGLLGVESPSLGLLFLFILKKNYYVLY

SEQ ID NO: 482 - protein, 115 aa, Homo sapiens
ILVLIKVHACGVNPVETYIRSGTYSRKPLLPYTPGSDVAGVIEAVGDNASAFKKGDRVFTSSTISGGYAEYALAADHTVYKLPEKLDFKQGAAIGIPYFTAYRALIHSACVKAGE

SEQ ID NO: 483 - protein, 120 aa, Homo sapiens
LYDNRTLTKGPDTVGTMGQCRSANAEDAQEFSDVERAIETLIKNFHQYSVEGGKETLTPSELRDLVTQQLPHLMPSNCGLEEKIANLGSCNDSKLEFRSIWELIGEAAKSVKLERPVRGH

SEQ ID NO: 484 - protein, 94 aa, Homo sapiens [sequence omitted]

SEQ ID NO: 485 - protein, 47 aa, Homo sapiens
QVESSPQPGLPAGEQLEGLKHAQDSDPRSPTLGIARTPMKTSSGGKR

SEQ ID NO: 486 - protein, 112 aa, Homo sapiens
  misc_feature (1)...(112): Xaa = any amino acid or nothing
LEAHSEMGSTEILEKETPENLSNGTSSNVEAAKRLAKRLYQLDRFKRSDVAKHLGKNNEFSKLVAEEYLKFFDFTGMTLISHSESRSVTQAGVQXHHLGSLQPPPSRFKQFS

SEQ ID NO: 487 - protein, 132 aa, Homo sapiens
RPVIPGSTISWALRGAAKMAASRWARKAVVLLCASDLLLLLLLLPPPGSCAAEGSPGTPDESTPPPRKKKKDIRDYNDADMARLLEQWEVRGARTPSRLFSVRDPVAYDPLPVLSWDLSDPLTSSTHALNPY

SEQ ID NO: 488 - protein, 93 aa, Homo sapiens
FVRAGFLPGFCRVSPCCSWVVETLAKMACAAARSPADQDRFICIYPAYLNNKKTIAEGRRIPISKAVENPTATEIQDVCSADGLNVFLEVKNV

SEQ ID NO: 489 - protein, 78 aa, Homo sapiens
MLTELVPTQAEPADLELLQELNRTCRAMQQRVLELIPQIANEQLTEELLIVNDNLNNVFLRHERFERFRTGPMALAGH

SEQ ID NO: 490 - protein, 78 aa, Homo sapiens
PKRSVLSKSVPGYKPKVIPNAICGICLKGKESNKKGKAESLIHCSQCENSGRWICDCCQRAPPTPRKVGRRGKNSKEG

SEQ ID NO: 491 - protein, 82 aa, Homo sapiens
AEGKKLGLVGWVQNTDRGTVQGQLQGPISKVRHMQEWPETREAYQKPPKTHRTIANFNNEKVILKLGLPQTFQIVKIMGLEF

SEQ ID NO: 492 - protein, 59 aa, Homo sapiens
  misc_feature (1)...(59): Xaa = any amino acid or nothing
SNLFSLSLFHLKGFFCFFFLDFXMESRSVARLECSGTILAYCNLCLPGSSDSPASASHL

SEQ ID NO: 493 - protein, 548 aa, Homo sapiens
MIADDKPAAMAGESAGQSSESGVGANFFGITFQTTETLMSTGHLNGAECKAGPGTVKTLAVEEEASRLWRKPDPYNTRREPDLRGGALDATGAQGGPLDRARKEPETACSHRRKSVAGQTPVGSNKKRNRVPGHVPAAGLTSAAATKERAQCSDTGGLDPYSAGHFSRATLLFCPPHTHRCISLTKSEKSERQQLFLPKPQSAVFGSEGRRTLRKLRRLSSPGAMDSDASLVSSRPSSPEPDDLFLPARSKGSSGSAFTGGTVSSSTPSDCAPELSAELRAAMGSAGAHSGTKLGGSGFKSSSSSTSSSTSSSAASSSKKVKKRMTEPELQQLRLKISSRERKRMHDLNIAMDGLREVMPYAHGPSVRKLSKIATLLLARNYISMLTTSLEEMKRLVSEIYGGHTPAGFHPSACGGLAHSAPLPAATAHPAAAAHAAHHPAVHHPILPPAAAAAAAAAAAAAVSSASLPGSGLPSVGSIRPPHGLLKSPSAAAAAPLGGGGGGSGASGGFQHWGGMPCPCSMCQVPPPHHHVSAMGAGSLPRLTSDAK

SEQ ID NO: 494 - protein, 54 aa, Homo sapiens
VRSLVISMTCKTAVSFLTSRVCSNRHGLIRKYGLNMCRQCFRQYAKDIGFIKLD

SEQ ID NO: 495 - protein, 61 aa, Homo sapiens
  misc_feature (1)...(61): Xaa = any amino acid or nothing
AMAYQLYRNTTLGNSLQESLDELIQSGRLNXKSNIFILMGLQXFLSYHLGKEIXGKISWTI

SEQ ID NO: 496 - protein, 140 aa, Homo sapiens
  misc_feature (1)...(140): Xaa = any amino acid or nothing
DFWREMMRASWLVRQDSRHQRIRLPHLEAIVSGRGPXTKITDKKCSRQQVGANPTSIDSVVIGKDQEVKLQPGQVLHMANELYPYIVXFEEEAKNPGLETHRKRKRSRNSDSIERDAAHEAEAGTGLEPGSNSGQCSVPL

SEQ ID NO: 497 - protein, 132 aa, Homo sapiens [sequence omitted]

SEQ ID NO: 498 - protein, 61 aa, Homo sapiens
QGRRKMEQPGAAASGAGGGSEEPGGGRSNKRSAGNRAANEEETKNKPKLRDRITSFRKSTV

SEQ ID NO: 499 - protein, 534 aa, Homo sapiens
MWESLELPRDLLNGFDQKPDSNMDNNVQAEVVSDGEEELVGNWRSPHKLRECLPLIIFLRNRLKYALTGDEVKICMQGFIKVDGKVRTDITYPAGFMDVISIDKTGDNFHLIYDTKGRFAVHRITPEEAKYKLGKVRKIFVGTKGIPHLVTHDAHSIRYLDPLIKEQAPGPARNWGNASSFPRSDGKPTVLSLRAATTGSTGLDLLCLNKLMLKEGEDPKRVATGIWGLLPPGTVGLVLGWSSLSSKGINVLTVVIDSDYHREILVMMDCKGLHILPPGSKIAQLLILSYWVPSLYGKERGKGSFGSTGATGVYWNQLITDQGPMKKLEIRILLAYWAQGQTFQSLVIKTGQKLGFGYLTPAAKREIEEIEQAVSQGQLDRIDPRYSIQLFYLSHQTLPYRVNRTDGPRAMLPRMGFLPHTGTKTLSPYSQLLTKVIYSGHKQCNQSLGYDPDVIRIPLSKKQFKAVLPVSINLQIAFSDYTGQIEHILPADKLLYFLSHTLVILPTKIVHSPIPNALTLFTDGSGKHGKAAVW

SEQ ID NO: 500 - protein, 92 aa, Homo sapiens
LASGGVAYQAIQALKNMGEILKAAGCDLSNVGTTTVLLGDINDFNTANEIYRQYLKSNFPARAAYQDAALPQGIRIEIEAVAMQGPLTTALL

SEQ ID NO: 501 - protein, 123 aa, Homo sapiens
TSAWRTAFWSTWPTSPPYKGWWWENAIAALFRRHIPVSWLIRATLSESENFEAAVGKLAKTPLIADVYYIVGGTSPREGVVITRNRDGPADIWPLDPLNGAWFRVETNYDHWKPAPKEDDRRT

SEQ ID NO: 502 - protein, 111 aa, Homo sapiens
  misc_feature (1)...(111): Xaa = any amino acid or nothing
LVAAWAPLWGGAAGLFTGSLNTQAPSTMASRGGGRGRGRGQLTFNVEAVGIGKGDALPPPTLQPSPLFPIGGVYPGSXRSECGSYRRNGLQFCSPRGPLRPQKIRRKQYRN

SEQ ID NO: 503 - protein, 42 aa, Homo sapiens
VCSDLSLSPSSPGCCSCCPVGCAKCAQGCICKGTSDKCSCCA

SEQ ID NO: 504 - protein, 437 aa, Homo sapiens
MWLWEDQGGLLGPFSFLLLVLLLVTRSPVNACLLTGSLFVLLRVFSFEPVPSCRALQVLKPRDRISAIAHRGGSHDAPENTLAAIRQGSPIFSGRPSHFLIRPQGTLPALDRSQCLGISGLEVLYLQKTADMYIVSVRLTLRLHTARNKAAKNGATGVELDIEFTSDGIPVLMHDNTVDRTTDGTGRLCDLTFEQIRKLNPAANHRLRNDFPDEKIPTLREAVAECLNHNLTIFFDVKGHAHKATEALKKMYMEFPQLYNNSVVCSFLPEVIYKMRQTDRDVITALTHRPWSLSHTGDGKPRYDTFWKHFIFVMMDILLDWSMHNILWYLCGISAFLMQKDFVSPAYLKKWSAKGIQVVGWTVNTFDEKSYYESHLGSSYITDSMLTASHLSTPSVAFVQAHSLAMASLLHPCRGLLASHLQQLDSDFRRPPVPIAM

SEQ ID NO: 505 - protein, 487 aa, Homo sapiens
MAPAPPPAASFSPSEVQRRLAAGACWVRRGARLYDLSSFVRHHPGGEQLLRARAGQDISADLDGPPHRHSANARRWLEQYYVGELRGEQQTGDKHPMRSETHHITETALAGVTRTFAFLHPVGSMENEPVALEETQKTDPAMEPRFKVVDWDKNTASGCLTPRAEDWLSIHRDTLILTPIVCGRLGPTSITDEGTEGLREEKMHVQDLTAGQRHSQALMDLVDWRKPLLWQVGHLGEKYDEWVHQPVTRPIRLFHSDLIEGLSKTVWYSVPIIWVPLVLYLSWSYYRTFAQGNVRLFTSFTTEYTVAVPKSMFPGLFMLGTFLWSLIEYLIHRFLFHMKPPSDSYYLIMLHFVMHGQHHKAPFDGSRLVFPPVPASLVIGVFYLCMQLILPEAVGGTVFAGGLLGYVLYDMTHYYLHFGSPHKGSYLYSLKAHHVKHHFAHQKSGGSHPLGGQVALGDPLLPGASLPRAQPTGLLQAVATGSSRKGK

SEQ ID NO: 506 - protein, 209 aa, Homo sapiens
FVAPSRARGAAGAGARMLEVHIPSVGPEAEGPRQSPEKSHMVFRVEVLCSGRRHTVPRRYSEFHALHKRIKKLYKVPDFPSKRLPNWRTRGLEQRRQGLEAYIQGILYLNQEVPKELLEFLRLRHFPTDPKASNWGTLREFLPGDSSSQQHQRPVLSFHVDPYVCNPSPESLPNVVVNGVLQGLYSFSISPDKAQPKAACRPAPLPPMP

SEQ ID NO: 507 - protein, 46 aa, Homo sapiens [sequence omitted]

SEQ ID NO: 508 - protein, 78 aa, Homo sapiens
  misc_feature (1)...(78): Xaa = any amino acid or nothing
RNRCTLCTQHLCERKEIMPLGIKPFTRPLALRRPRGSPLAAPLRVXCQGALFLFSHTGAVYTMYSDYVKRMAQDAGEK

SEQ ID NO: 509 - protein, 129 aa, Homo sapiens
KVHMNGLRYALYIMGPALTRGSTRCLLSMLRSNRTDLDLMMKEAYFGEVDIMDDLPTGNISANVTGRLYKCGVINHTVDLRRMKTEKWQNNLLPSRQFGFIVLTTSAGIMDHEEARRKHTGGKILGFFF

SEQ ID NO: 510 - protein, 137 aa, Homo sapiens
ASTIRRRCFHSVISTEHRGLTMEFGLSWVFLVALLRGGQCHEQLVESGGGVVQPGRSLRLSCVAPKFMFSDSSSSSSSSSSSSSSSSSSSSSSSSPDKHYADSVKGRFTISRDNSKNTLYLQMNSLSAEDTAVYYCA

SEQ ID NO: 511 - protein, 499 aa, Homo sapiens
FRARRQGRLGDPVRRCGTPRTGAACWRSAANRGVLLSGLIGVVSWKRPLSLVITFFMLLSAVCVMLNLAGSILSCQNAQLVNSLEGCQLIKFDSVEVCVCCELQHQSSGCSNLGETLKLNPLQENCNAVRLTLKDLLFSVCALNVLSTIVCALATAMCCMQMVSSDVLQMFLPQRSHPANPTCVTPHGTVLHQTLDFDEFIPPLPPPPYYPPEYTCTPSTEAQRGLHLDFAPSPFGTLYDVAINSPGLLYPAELPPPYEAVVGQPPASQVTSIGQQVAESSSGDPNTSAGFSTPVPADSTSLLVSEGTATPGSSPSPDGPVGAPAPSEPALPPGRVSPEDPGMGSQVQPGPGHVSRSTSDPTLCTSSMAGDASSHRPSCSQDLEAGLSEAVPGSASMSRSATAACRAQLSPAGDPDTWKTDQRPTPEPFPATSKERPRSLVDSKAYADARVLVAKFLEHSHCALPTEAQHMVGAMRLAVTNEERLEEEAVFGADVLDQV

SEQ ID NO: 512 - protein, 74 aa, Homo sapiens
LQAITMSTDTGVSLPSYEEDQGSKLIRKAKEAPFVPVVFGDSPALSPRLECSGRISAHCSLCLLGSSDSPTSAS

SEQ ID NO: 513 - protein, 138 aa, Homo sapiens
EYVTVRRINLEACSNEMVTFLQGELHVSKLFNHPNIVPYRATFIADNELWVVTSFMAYGSAKDLICTHFMDGMNELAIAYILQGVLKALDYIHHMGYVHRSVKASHILISVDGKVYLSGLRSNLSCPGAFSKGHQCLA

SEQ ID NO: 514 - protein, 423 aa, Homo sapiens
  misc_feature (1)...(423): Xaa = any amino acid or nothing
MPPGVFSGLTLLRLNLRSNHFTSLPVSGVLDQLKSLIQIDLHDNPWDCTCDIVGMKLWVEQLKVGVLVDEVICKAPKKFAETDMRSIKSELLCPDYSDVVVSTPTPSSIQVPARTSAVTPAVRPNSTGAPASLGAGGGASSVPLSVLILSLLLVFIMSVFVAAGLFVLKPIDYYGEICDNACLCEEKVRHFNCELXKPGDHQSLXNXPSPFPNLPPLRCPETFXTVSIPMSLSHYTGASILHLGSNVIQDIETGAFHGLRGLRRLHLNNNKLELLQRXYLPWLGEPPVPTGRLQLHQRHXTQCFWETAFVAGAYPRMTIFCPVYPTIFSVLCPYCTWTSRGTGXNFCPTWGSCSTGVLXSRTKQGIQRPHFRDSRLREPVLYSPPSAVFVEPNRNEYLELKAKLNVEPDYLEVLEKQTTFSQF

SEQ ID NO: 515 - protein, 172 aa, Homo sapiens
GSVTPAIRSLALLAAILLVALQARAEPLQAIADEATAQEQPGADDQEVVDSFAWDERAPLQVSGKSSPVCARLLLLQETRDRGLLFALPLHSAYLEDLLRQSHFRQELMKLQPRSSLEQMIRKWLMPLHGMKVPLFRFQPDKIIVLSTLIPTGDYSPHNLKNLFMRMVTPSP

SEQ ID NO: 516 - protein, 81 aa, Homo sapiens
AHVDTMSKAHPPELKKFIDKKLSLKLNGGRHVQGILWGFDPLMNLVIDKCVEMATSGQQKNIGMVVIRRNSIIMLETLEQE

SEQ ID NO: 517 - protein, 121 aa, Homo sapiens [sequence omitted]

SEQ ID NO: 518 - protein, 56 aa, Homo sapiens
NNFLEMRSLLPRLECSGVIAAHCSLELLGSSDPPASASQSVGTTGVSHGTCLHQYS

SEQ ID NO: 519 - protein, 263 aa, Homo sapiens
HSMIETYNQTSPRSAATGLPISMKIFMYLLTVFLITQMIGSALFAVYLHRRLDKIEDERNLHEDFVFMKTIQRCNTGERSLSLLNCEEIKSQFEGFVKDIMLNKEETKKENSFEMQKGDQNPQIAAHVISEASSKTTSVLQWAEKGYYTMSNNLVTLENGKQLTVKRQGLYYIYAQVTFCSNREASSQAPFIASLCLKSPGRFERILLRAANTHSSAKPCGQQSIHLGGVFELQPGASVFVNVTDPSQVSHGTGFTSFGLLKL

SEQ ID NO: 520 - protein, 68 aa, Homo sapiens
  misc_feature (1)...(68): Xaa = any amino acid or nothing
PTCVYVCVLKQKCVCVCACVARAACTCVPVFVCLCVXKPWXGFNCGVFPCIQVYAFFFWRIGSNGCYY

SEQ ID NO: 521 - protein, 211 aa, Homo sapiens
  misc_feature (1)...(211): Xaa = any amino acid or nothing
RSPLLEWLPTLCFYNGKGLEQIERDNSFHNVAEATFTLKLIQSLIASGIAGSMIGVITLYKSQMYKLCHLLSAVDFHHPDIKTVQVSTVDAFKEAEKEIIILSCVRTRQVGFIDSEKRMNVALTRGKRHLLIVGNLACLRKNQLWGRVIQHCEGREDGFNMQTSMNHSXTISLKIILKNKWKKNRRKRVKKRNLKINLIHKKTWCKYFVFM

SEQ ID NO: 522 - protein, 42 aa, Homo sapiens
TTTALGLLTIPIIIHPIDRSVDFLLDSSLRKLYPTVGKPSSS

SEQ ID NO: 523 - protein, 27 aa, Homo sapiens [sequence omitted]

SEQ ID NO: 524 - protein, 47 aa, Homo sapiens
FLTPSPESPDQWSSSSPHSNVSDWSEGVSSPPTSMQSQIARIPEAFK

SEQ ID NO: 525 - protein, 283 aa, Homo sapiens
GSEQASSVSSHASGEFRFTSEVPIRFDYHGKHVSMDQGTLAGILIGLAQLNCSELKLKRLSYRHGLLGVDKLFSYAITEWLNDIKKNQLPRILGGVGPMHSLVQLVQGLKDLVWLPIEQYRKDGRIVRGFQRGAASFGTSTAMAALELTNRMVQTIQAAAETAYDMVSPGTLSIEPKKTKRFPHHRLAHQPVDLREGVAKAYSVVKEGITDTAQTIYETAAREHESRGVTGAVGEVLRQIPPAVVKPLIVATEATSNVLGGMRNQIRPDVRQDESQKWRHGDD

SEQ ID NO: 526 - protein, 110 aa, Homo sapiens
  misc_feature (1)...(110): Xaa = any amino acid or nothing
PSHPSSFGSAPHPHLLPTTPAAPFPAQASECPVAAATAPHTPGPCQSSHLPSTSMPPXRCPHHSSGCSHPCIGHCGGHCSGPSPPTLXLXGCPXLXPGMGVGXGSMYPPT

SEQ ID NO: 527 - protein, 137 aa, Homo sapiens
ELKTFSCSLLHDGDPTYQRLFLDCLVHSLRELHTGDVMILPVLSCFTRFMAGLIFVLHSCFRFITFVCPTSSDPLRTCAVLLCVGYQDLPNPVFRYLQSVNELLSTLLNSDSPQQVLQFVPNGRYSLRRPCLIFCGI

SEQ ID NO: 528 - protein, 133 aa, Homo sapiens
  misc_feature (1)...(133): Xaa = any amino acid or nothing
LIYCNFDLLRRDVLYYKGRLDMDGLEVVDLKDGKDRDLHVSIRNAFRLHRGATGDSHLLCTRKPEQKQRWIKAFAREREQVQLDQETGFSITELQRKQAMLNASKQLMAGPATXRARSTQPCPATGPSIRTGA

SEQ ID NO: 529 - protein, 112 aa, Homo sapiens
GLKGRGLKHYPIRDAGLGTSNQAGSWRGQVGFRDVVGPLSLAAAGGQGLVLTAVCPLLLESQPLWPYDLQGSLTFRDVAIEFSLEEWQCLDTAQQNLYRNVMLENYRNLVFL

SEQ ID NO: 530 - protein, 155 aa, Homo sapiens
GEAEMEERAFVNPFPDYEAAAGALLASGAAEETGCVRPPATTDEPGLPFHQDGKIIHNFIRRIQTKIKDLLQQMEEGLKTADPHDCSAYTGWTGIALLYLQLYRVTCDQTYLAPIHLITEKKPLRKLNGRRVTFLCGDAGPLAVGAVIYHKLRSD

SEQ ID NO: 531 - protein, 73 aa, Homo sapiens
  misc_feature (1)...(73): Xaa = any amino acid or nothing
TFTIIXKMTACLSXSLLXKILESFKASXXNASGXPRMTGVTITIGKTXIEEXTSQFMAKLSALVTVTNSHRYF

SEQ ID NO: 532 - protein, 227 aa, Homo sapiens
EDLLQFSANIPALYNSKQLEDFFKGGIINDSSELIGPAEAHSDSLIDTFPECSTEGFSSDSDLVSLTVDVDSLAELDDGMASNQNSPIRTFGLNLSSDSSALGAVASDSEQSKTEEERESRSLFPGSLKPKLGKRDYLEKAGELIKLALKKEEEDDYEAASDFYRKGVDLLLEGVQGESSPTRREAVKRRTAEYLMRAESISSLYGKPQLDDVSYVCLQLLMALLLI

SEQ ID NO: 533 - protein, 122 aa, Homo sapiens [sequence omitted]

SEQ ID NO: 534 - protein, 138 aa, Homo sapiens [sequence omitted]

SEQ ID NO: 535 - protein, 389 aa, Homo sapiens
  misc_feature (1)...(389): Xaa = any amino acid or nothing
GRKKRRNTQKWLREWRAAQGKDPGPSEKQKPVFTPLRRPGMLVPKQNVSPPDMSALSLKGDQALLGGIFYFLNIFSHGELPPHCEQRFLPCEIGCVKYSLQEGIMADFHSFINPGEIPRGFXFHCQAASDSSHKIPISNFERGHNQATVLQNLYRFIHPNPGNWPPIYCKSDDRTRVDWCLKHMAKASEIRQDLQLLTVEDLVVGIYQQKFLKEPSKTWIRSLLDVAMWDYSSNTRCKWHEENDILFCALAVCKKIAYCISNSLATLFGIQLTEAHVPLQDYEASNSVTPKMVVLDAGRYQKLRVGSSGFSHFNSSNEEQRSNTPIGDYPSRAKISGQNSSVRGRGITPPLLESISNSSSNIHKFSNCDTSLSPYMSQKDGYKSFSSLS

SEQ ID NO: 536 - protein, 186 aa, Homo sapiens
  misc_feature (1)...(186): Xaa = any amino acid or nothing
SPSSGSCPSPSPAHSSSDSITQVIGVQVAFGYISCLPTLRPLSRTCCLLSPPSPLTLTLSPKPLPLLRTAPPVRPPPXPPVLPRRPRPRLTQTLYRLARPPLPRGPAPLPPPRPQLQPPRSPPSLTXATPRPQPLPLAICLLVSWLTKGLSSAQAPLLVSGRPLRLLRPASPPLHQSPPRLGQPVL

SEQ ID NO: 537 - protein, 66 aa, Homo sapiens [sequence omitted]

SEQ ID NO: 538 - protein, 195 aa, Homo sapiens
IRDSGECSDCGKTFSCSSALILHRRIHTGEKPYECNECGKTFSWSSTLTHHQRIHTGEKPYACNECGKAFSRSSTLIHHQRIHTGEKPYECNECGKAFSQNSHLYQHQRIHTGEKPYECMECGGKFTYSSGLIQHQRIHTGENPYECSECGKAFRYSSALVRHQRIHTGEKPLNGIGMSKSSLRVTTELNIREST

SEQ ID NO: 539 - protein, 136 aa, Homo sapiens
  misc_feature (1)...(136): Xaa = any amino acid or nothing
RRVLCYPLYRHFKLVMRAYRDTIDILQLGKSAALKCLLDIHKIFQDNDPAYILNDLYISYYCVWIHKVKSKKLSDLAEALKEVSLTKAQLGLELXELEAAALLVQEEETALKAAHSVSGQQTLCSSSEASDSEDSY

SEQ ID NO: 540 - protein, 102 aa, Homo sapiens
DEENRGSYTEGLHENGVCCSDPLSLLESRMEVDDYSQYEEESTDDSSSSEGDEEEDDYDDDFEDDFIPLPPAKRLRLIVGKDSIDIDISSRRREDQSLRLNA

SEQ ID NO: 541 - protein, 155 aa, Homo sapiens
  misc_feature (1)...(155): Xaa = any amino acid or nothing
DHCSPTSDSSLSVPQLPHLVSEDLGXGLRRRSPSFVQSRTGWPMSQESLTFKDVFVDFTLEEWQQLDSAQKNLYRDVMLENYSHLVSVGYLVAKPDVIFRLGPGEESWMADGGTPVRTCAGEDRPDVSIFASLYFEVLLLEVWQVDEQIDHYKES

SEQ ID NO: 542 - protein, 143 aa, Homo sapiens
IGACLADVDPMQLDSSVRFDSVGGLSNHIAALKEMVVFPLLYPEVFEKFKIQPPRGCLFYGPPGTGKTLVARALANECSQGDKRVAFFMRKGADCLSNSVGESQRQPRLLFDQAYQRRQQFISFDEIDGLAPVRSRRQDQIHR

SEQ ID NO: 543 - protein, 220 aa, Homo sapiens
GWLVTAFCTSSSKEGGWALFLFLLEEGLAQVFSFSLPHHLTASRPPLSPSPPIVMTPSPDYLVVLFGITAGPTGAKLGSDEKELILLFWKVVDLANKKVGQLHEVLVRPDQLELTEDCKEETKIDVESLSSASQLDQALRQFNQSVSNELNIGVGTSFCLCTDGQLHVRQILHPEASKKNVLLPECFYSFFDLRKEFKKCCPGSPDIDKLDVAPMTECIL

SEQ ID NO: 544 - protein, 155 aa, Homo sapiens
  misc_feature (1)...(155): Xaa = any amino acid or nothing
STKTQPLLRNSDKDSKTNLLPTPTHHRPNTSQGPXMKASPPHPPPQAKNHSSVEYSPGTRSIPPPSFLPLFPXQSQHCPPAASLALPKQHPPPGRGSCTVLVPPPETYFFSSALLVFRPPSLYGGPFILYRERKRKGRGGRDFLVQYNQKIFLKS

SEQ ID NO: 545 - protein, 62 aa, Homo sapiens
IPAEVVKQRLQDVQLRSTGQQSGCIRTVWRTEGLGAFYRSYTTQLNMNIPFQSIHFITYESC

SEQ ID NO: 546 - protein, 95 aa, Homo sapiens
  misc_feature (1)...(95): Xaa = any amino acid or nothing
ERVLLCLPGLGCGGVILAHGSLALPGSSSLHLSLQSSWGLTGMXYDARLIFVYFFREMGSCHICQAGLNSYNSSIPPTLVSQNVGTPGLKPPRPS

SEQ ID NO: 547 - protein, 64 aa, Homo sapiens
TETRPRAALPAGLLGTARGPGRGANSAPSAPGGKARPGKAGCGGCRKSEPPLRGRPLKGRPSAA

SEQ ID NO: 548 - protein, 131 aa, Homo sapiens
  misc_feature (1)...(131): Xaa = any amino acid or nothing
MAAMCFWALIPNQVFRGFQMTLKMQYLFLSFFPSFFLGTRVGARSPGWGCWECSGAISAHCSLCFPGSSVSPASAFRVAGITGMYHYAWLIFISIFLVEMGFHHVCQAGLELLAXVIRPPQPPKVLGLQAR

SEQ ID NO: 549 - protein, 61 aa, Homo sapiens
  misc_feature (1)...(61): Xaa = any amino acid or nothing
LGTHLTSAFLCVFSKSIIKKFWPGAVAHACNPSTLGGRREXITXGQDFETSLANMAKLCLY

SEQ ID NO: 550 - protein, 132 aa, Homo sapiens
HSKFNVFKLVGAPAENTSSSALLFFHTRLGPAIQERMKGGAPGGEGRALAGRPSQPLTESCPCLKMYFILASGSLPFLPFPLYCLKNRFEAQVRCLTSVIPTLWEAEMGGLLEPRKFKTSTGQHSETPSLNK

SEQ ID NO: 551 - protein, 213 aa, Homo sapiens [sequence omitted]

SEQ ID NO: 552 - protein, 47 aa, Homo sapiens
MKKEKEEADCWSVKEILAGRGGHACNPSTLGGRGGWITRSGDRDHPG

SEQ ID NO: 553 - protein, 115 aa, Homo sapiens
  misc_feature (1)...(115): Xaa = any amino acid or nothing
QGWPPPKPDRQSTQACGACTQTLQRPWSLYMLVKPWPWRGDPGRLGPRLLPPPRKDCPRWFSQKAGAPGPPWSPGGIIPAIPAQTPXRSXETALPEASRLCYRAPGSTGQGPITP

SEQ ID NO: 554 - protein, 52 aa, Homo sapiens
ITNKCSFSIGIKDYSNWPTIPQVYLNGEFVGGCDILLQMHQNGDLVEELKKL

SEQ ID NO: 555 - protein, 194 aa, Homo sapiens
TLPQAQKLTDDQGPVLMSTVAMPVFSKQNETRSKGILLGVVGTDVPVKELLKTIPKYKLGIHGYAFAITNNGYILTHPELRLLYEEGKKRRKPNYSSVDLSEVEWEDRDDVLRNAMVNRKDTGKFSMEVKKTVDKGKRVLVMTNDYYYTDIKGTPFSLGVALSRGHGKYFFPRECNPSEEGLHDLEHPDVSFGR

SEQ ID NO: 556 - protein, 149 aa, Homo sapiens
  misc_feature (1)...(149): Xaa = any amino acid or nothing
VTLRLLKRIRPSRPRRRNEVTSLLRDAANITEMDSENSAKEGDPGTIFFFREGAAVFRNVKDKTMKHVMNVLQKHEIQPYEIALVHWENEELNYIQIQGQSKLHRGEIKLNSXLDLHDAILEKFAFSNALCLSVKLAIWEASLDKFIES

SEQ ID NO: 557 - protein, 155 aa, Homo sapiens
PTRPEKLISQIQPEVDRERAVVEVNIPVESEVNLKLQNIMMLLRKCCNHPYLIEYPIDPVTQEFKIDEELVTNSGKFLILDRMLPELKKRGHKVLLFSQMTSMLDILMDYCHLRDFNFSRLDGSMSYSEREKNMHSFNTDPEVFIFLVSTRAGGL

SEQ ID NO: 558 - protein, 124 aa, Homo sapiens
  misc_feature (1)...(124): Xaa = any amino acid or nothing
LIGLIQMYLPSSYQENDCEGNDGSRRPAENSLGESHRKCTLQKRNRNQRTQKRKIYNVCPRKGKKIFIHMHEIIQIDGHIYQCLECKQNFCENLRSYYVVERTHTGEKPYXCIQGTGIYDHLSE

SEQ ID NO: 559 - protein, 483 aa, Homo sapiens
LVSEHAFEIPDNVRPGHLIKELSKVIRAIEEENGKPVKSQGIPIVCPVSRSSNEATSPYHSRRKMRKLRDHNVRTPSNLDILELHTREDILSSKLNGKFNKHLQPSSTVPEWRAKDNDLRLLLTNGRIIKDERQPFADQSLYTADSENEEDKRRTKKAKMKIEESSGVEGVEHEESQKPLNGFFTRVKSELRSRSSGYSDISESEDSGPECTALKSIFTTEESESSGDEKKQEITSNFKEESNVMRNFLQKSQKPSRSEIPIKRECPTSTSTEEEAIQGMLSMAGLHYSTCLQRQIQSTDCSGERNSLQDPSSCHGSNHEVRQLYRYDKPVECGYHVKTEDPDLRTSSWIKQFDTSRFHPQDLSRSQKCIRKEGSSEISQRVQSRNYVDSSGSSLQNGKYMQNSNLTSGACQISNGSLSPERPVGETSFSVPLHPTKRPASNPPPISNQATKGKRPKKGMATAKQRLGKILKLNRNGHARFFV

SEQ ID NO: 560 - protein, 98 aa, Homo sapiens
  misc_feature (1)...(98): Xaa = any amino acid or nothing
XIFAAKELENEENQEEQGLEEKGEEFARMLTELLFELHVAATPDKLNKAMKRAHDWVEEDQTVVSVDVAKSVRRRNKEGRKGREISRPSRRQKGGKEN

SEQ ID NO: 561 - protein, 81 aa, Homo sapiens; identical to SEQ ID NO: 516

SEQ ID NO: 562 - protein, 272 aa, Homo sapiens [sequence omitted]

SEQ ID NO: 563 - protein, 128 aa, Homo sapiens
GKNYQNPKSNAVSLLSHLWLANTAAALRINTDLLPTSYQLVKFEDIVHFPQKTTERIFAFLGIPLSPASLNQILFATSTNLFYLPYEGEISPTNTNVWKQNLPRDEIKLIENICWTLMDRLGYPKFMD

SEQ ID NO: 564 - protein, 116 aa, Homo sapiens
VLEETYECIRGDKGFQFFSQQVSHHPPISACHAESINVGYWLDARWTSLLWGKSMQIVPIGTNHVTLPLFGDHIEWNKLTSCIHIILSVQKWIEHYGEIAIKNLLDDCCYCHTNFI

SEQ ID NO: 565 - protein, 144 aa, Homo sapiens
INTLLLSGGKGGKNKKNKNSSKPQKNNGSTWANVPLPPPPVQPLPGTELEHYAVEQQENGYDSDSWCPPLPVQTYLHQGLEDELEEDDDRVPTPPVRGVASSPAISFGQQSTATLTPFPTGRRWQPMAGRLHLGWSLTRRPIQF

SEQ ID NO: 566 - protein, 897 aa, Homo sapiens
LDLCRQSNNLCLQREEDLQRTRDYHDCMNVVEVFLEKFTTEWDNLARSDAESTAVHLEALKKLALALQERKYAIEDLKDQKQKMIEHLNLDDKELVKEQTSHLEQRWFQLEDLIKRKIQVSVTNLEELNVVQSRFQELMEWAEEQQPNIAEALKQSPPPDMAQNLLMDHLAICSELEAKQMLLKSLIKDADRVMADLGLNERQVIQKALSDAQSHVNCLSDLVGQRRKYLNKALSEKTQFLMAVFQATSQIQQHERKIMFREHICLLPDDVSKQVKTCKSAQASLKTYQNEVTGLWAQGRELMKEVTEQEKSEVLGKLQELQSVYDSVLQKCSHRLQELEKNLVSRKHFKEDFDKACHWLKQADIVTFPEINLMNESTELHTQLAKYQNILEQSPEYENLLLTLQRTGQTILPSLNEVDHSYLSEKLNALPRQFNVIVALAKDKFYKVQEAILARKEYASLIELTTQSLSELEAQFLRMSKVPTDLAVEEALSLQDGCRAILDEVAGLGEAVDELNQKKEGFRSTGQPWQPDKMLHLVTLYHRLKRQTEQRVSLLEDTTSAYQEHEKMCQQLERQLKSVKEEQSKVNEETLPAEEKLKMYHSLAGSLQDSGIVLKRVTIHLEDLAPHLDPLAYEKARHQIQSWQGELKLLTSAIGETVTECESRMVQSIDFQTEMSRSLDWLRRVKAELSGPVYLDLNLQDIQEEIRKIQIHQEEVQSSLRIMNALSHKEKEKFTKAKELISADLEHSLAELSELDGDIQEALRTRQATLTEIYSQCQRYYQVFQAANDWLEDAQEMLQLAGNGLDVESAEENLKSHMEFFSTEDQFHSNLEELHSLVATLDPLIKPTGKEDLEQKVASLELRSQRMSRDSGAQVDLLQRCTAQWHDYQKAREEVID

SEQ ID NO: 567 - protein, 363 aa, Homo sapiens
TDTESYPEFLQRQHSSPWGPPQALDSGTAWLRCHGPDRSCSHGAGDGQIALLPLDRKPAKPLWFRRALCSPRKHFDGELGDSTHPAPNWAGFNFTLLLTWAEPQAGGGEDALPLRILKRLDNADEQAAQIRRELDGRLQLADKMAKKYVNVILEEKKSRWPETLGLICEVVPDVPSNPMNELVQERKFPKFIAKDMENMYIEELRSSVNLLMANLESLPVSKGGPEFKLQKLKRSQNSAVLDIGDENEIQLSKSDVVLSFTLEIVIMEVQGLKSVAPNRIVYCTMEVEGEKLQTDHAEASRPQWGTQGDFTTTHPRAVVKVKLFTESTGVLALEDKELVRVILYPTSNSSKSAELHRMVVPKN

SEQ ID NO: 568 - protein, 96 aa, Homo sapiens
  misc_feature (1)...(96): Xaa = any amino acid or nothing
AERRGAVSPRSRDGGGVGGPCAMATSVLCCLRCCRDGGTGHIPLMEMPAVHLLTQLMGSDVCIVPSCLPLCGIXVWLLLCAIPRCLIFFTFWWGVG

SEQ ID NO: 569 - protein, 110 aa, Homo sapiens
  misc_feature (1)...(110): Xaa = any amino acid or nothing
YQRCNRKATCAPRRLRAFSLASRAPRRGTHRTPGRDSSPLRXLRTRRPPPPSPPRNKPRQRAVGRGQSPCRDQSEPRRLRSLYHQVPSVVRAAPKKMSPEAVPLGASLPP

SEQ ID NO: 570 - protein, 234 aa, Homo sapiens
  misc_feature (1)...(234): Xaa = any amino acid or nothing
RDALGAGCRILLICEMQLTHQLDLFPECRVTLLLFKDVKNAGDLRRKAMEGTIDGSLINPTVFHSCCPGWSAMARSWLTATSASRVQAVVLPQPPELLGLQIVDPFQILVAANKAVHLYKLGKNGRQXTLSTEIYFQPFPPNNQYFTRLXKNFGISANXHFQFLIVYIEEGEKQINQEYLISQVEGHQVSLKNPPEIMNKTEMSTKIYKLSSQEESIGTLLDAIICRMSTKDVL

SEQ ID NO: 571 - protein, 194 aa, Homo sapiens
TGTVAAKAMDTFSTKSLALQAQKKLLSKMASKAVVAVLVDDTSSEVLDELYRATREFTRSRKEAQKMLKNLVKVALKLGLLLRGDQLGGEELALLRRFRHRARCLAMTAVSFHQVDFTFDRRVLAAGLLECRDLLHQAVGPSLISKSHGRINHVFGHLADCDFLAALYGPAEPYRSHLRRICEGLGRMLDEGSL

SEQ ID NO: 572 - protein, 52 aa, Homo sapiens
  misc_feature (1)...(52): Xaa = any amino acid or nothing
SGIGDFDINKDAAAAASRGVGAKLGPXRAVAGEHTHDPGAGPLPDAFQGLQP

SEQ ID NO: 573 - protein, 43 aa, Homo sapiens
SGSSWRPGSSPKTGAQIREARRAPAGAQRIGGRRSLEHSLHAP

SEQ ID NO: 574 - protein, 152 aa, Homo sapiens
  misc_feature (1)...(152): Xaa = any amino acid or nothing
ARAHTHREPTMVLSPADKTNVKAAWGKVGAHAGEYGAEALERMLLSFPTTPTYFPHFDLNHGSAHVKGHGKNVDDALTNAVTHVYYMPNSLYALSDLHPHNLRMDPVNFMLLSHCLLXTLVVHLPAELTPAVHASLNNVLESERTELTSSTS

SEQ ID NO: 575 - protein, 152 aa, Homo sapiens; identical to SEQ ID NO: 574
  misc_feature (1)...(152): Xaa = any amino acid or nothing

SEQ ID NO: 576 - protein, 109 aa, Homo sapiens
KLPPSPWPLACSAAEQVTLGRNTVSSEKLAGGRVHLSPYCDPWIPHCATPEQAGAPQDKDDLLMASWPVGICLPTTVAPRSPKQEFPCFKVTAKINRRIKHVFEPSGFH

SEQ ID NO: 577 - protein, 26 aa, Homo sapiens
AGIRYISSFIFFFDIYQSPSMHQTLL

SEQ ID NO: 578 - protein, 111 aa, Homo sapiens
  misc_feature (1)...(111): Xaa = any amino acid or nothing
GIDTILTLNQNXSLKTRQXFTLIIFIFFFFLRWSLDSVAQAGVQWRDLGSLQAPPRGFTPFSCLSLPSSWDYRRPLPRPANFFYFXXRRGFTMLARMVSISXPRDLPAEFL

SEQ ID NO: 579 - protein, 176 aa, Homo sapiens
  misc_feature (1)...(176): Xaa = any amino acid or nothing
NLFHAKPERRDSANLWVLVDCIFRDTSEDLGFQCDAVNLAFGRRCEELEDARHKLQHHLHKMLREITDQEHNVVALKEAIKDKEEPLHIAQTRLXLLSHRPNMQLAPNAAQFSPSSLPPNTPKLLQAEQSLRNLKDIHMSLEKDVTAMTNSVFIDRQKCMAHRTCYPTILQLAGYQ

SEQ ID NO: 580 - protein, 176 aa, Homo sapiens; identical to SEQ ID NO: 579
  misc_feature (1)...(176): Xaa = any amino acid or nothing

SEQ ID NO: 581 - protein, 65 aa, Homo sapiens
  misc_feature (1)...(65): Xaa = any amino acid or nothing
XSDDEEQLTELDEEMENEICRVWDMSMDEDVALFLQEFNAPDIFMGVLAKSKCPRLREICVGILX

SEQ ID NO: 582 - protein, 44 aa, Homo sapiens
  misc_feature (1)...(44): Xaa = any amino acid or nothing
SSKPWDXSLAPKHSGXTKNMDCYCIIPTCIGRERCYGTCIGDTV

SEQ ID NO: 583 - protein, 134 aa, Homo sapiens
  misc_feature (1)...(134): Xaa = any amino acid or nothing
VLSLLWEFALEPRVRHELTLSLLFRKRRADMPRVLVFRALLMVLIFLFVASYWLFYGVRILDSRDRNYHGIVQYAVSLVDALLFIHYLAIVLLELRQLQPMFTLQVVRSTDGESRFYSLXHLSIQRAALVVLEN

SEQ ID NO: 584 - protein, 199 aa, Homo sapiens
IRTSRTGVSLLVPNGAIPQGKFYEMYLLINKAESTLPLSEGTQTVLSPSVTCGPTGLLLCRPVILTMPHCAEVSARDWIFQLKTQAHQGHWEEVVTLDEETLNTPCYCQLEPRACHILLDQLGTYVFTGESYSRSAVKRLQLAVFAPALCTSLEYSLRVYCLEDTPVALKEVLELERTLGGYLVEEPKPLMFKDSYHNL
